United States Patent Application Publication US 2024/0268394 A1 - sequence listing, part 8

SEQ ID NO: 109 - DNA, 326630 bp, Pseudomonas nodulensis
  misc_feature (190287)..(190362): n is a, c, g, or t
  misc_feature (264053)..(264130): n is a, c, g, or t
tgtttgccgagatcgatcccgatcagtgctgactcgctcatgatgatggcctccgaaaacaaaacaccctgtgaaagcgtagccctcacagggtgttgggggtgaccatctcattaaccggggcggttcttgtaggaaccgtcccggtttttttgtgcgcgacggttaagccggctgttcttccttgcccaggcacgcggcggcggtgaacaacacatcggtggacgaattcagcgcggtttccgccgaatcctgcaacacaccgatgatgaaaccgaccgctaccacctgcatcgcaatctcactgggaatgccgaacaggctgcacgccagcggaatcagcaacaacgaaccgcctgccacgccggaagcaccgcacgcacagatggccgcaaccacactgagcagcaccgcagtgggcaggtcgacggcgatgcccagggtgtgcacggcggccagggtcaacacggtgatggtgatcgccgcgccggccatgttgatggtggcacccagtgggatcgacaccgagtaggtatcttcatgcaggcccaggcgtttgctcagcgccaggttcaccgggatattggctgccgaactgcgggtgaagaacgcggtaatgccgctctcacgcaggcacatcagcaccagcgggtaagggttgcggcgcagtttccagaacacgatggccgggttgatcaccagcgccacgaacagcatgcagccgatcagcaccaccagcaggtgggcgtagccgagcagggcaccgaagccggaggtggccagtgtggaggcgaccaggccgaaaatgcccagcggtgcaaagcggatcaccacgcgcacgatcagggtcacaccgttggacaggtcttccagcaccgcccgcgtggtcggcgcggcgtggcgaatggcaatgcccatgccgatggcccacgccaggatgccaatgaagttggcattcatcagcgcgctgatcgggttgtccaccacgctcagcaacaggctctgcaacacttcgccgatgccgccgggcgcggtcaccgctgcgtcatgggtcgccagcaccagcgaagagggaaaccacatgctggcaaccactgccaccacggcggcggcaaaggtgcccagcaaatacaggaacaggatcggcttgatatgggtttcctggccatgcttatggttggcaatggatgccatcaccagcacaaacaccaggatcggcgccacggccttgagcgcggaaacaaataccttgccgataaacccggtggagcgtgccacttcggggagcagcagggccaacaggatgccggcgatcaggccgatgacgatttgcgtgaccaggctgacgcgggccaggcgttgcaggagagagggggcagcagtcataaacacttgtctctagtttttttagggcgcagctactgactcggaaagggctgtaggacgcggatcgcgaagtctagcatgctgtgggaaaagtccttggcggtgcggcattgcgtcacccgcttgcccaggccttggccaaatctggacatactctgataagattctgttctctcatctttcctctccgtcagcgggcccttcgggttgtcgttgatgtcgtcgtttctggagttttcatgttgtttcccatcctgctgctgtcagccgccggctttaccgtgctgaccacagaattcgtgatcgtcggcctgttgccgtccatcgcccgcgacttgaatgtcagtgtgtcccaggccgggctgctggtgaccttgttcgcgtttaccgtggcggcgtttggtccgtttctgacggcgtactgtgcacgtttcccacgcaagcgcctgtttatcagcatcctgatcctgttcggtgtggccaataccgtggcggccctggcaccgaacatctgggtgatggcgctggcacggttgatcccggcgctgggtttaccggtgttctgggccctggccagcgaaacggcggtagacatcgtcggccccgaattcgccgggcgcgccatcgagaagatcggctttggtatcgtctgcgccacggtattcggcattccggtgggcacgctgatttcagatatgttcggctggcgcagcgcgtttgccatcctcgcggtgatcgcgctggccaaggccttgctgctgtctatctacctgccggtgacccagccgaagaacgatgaagtgacgttgcgcgcgcagttcaagatcctgcgcaacccgctgatgcaggggcatatcctgctgtcgatcctggtgttcagcggcatgttcacggcgtacacctacctggcggacatccttgagcgcctggccgggttcgacggcacgctggtgggctggtgcctgatgggcttcggtgcggtcggcctgatcggcaattcgctgggcggacgggcggtggatcgccacccgttgatcgcgtccatggtgttctgtgggttcatgatcgccggcatggtcgcgctggtgccggcgattcattcgagcatcggcctggcggcggcgatggccgtgtggggcgtaacccaggcggcgatgttcctggtcagccatgtgcgcctgatgaaggccgcgccccatgcgccagcgtttgctgcgtcgctgaacatcgccggggccaacctgggcatcggcctaggcgccatggtcggcggccatgtgatcgacaccctcggcctgggcagcctgggctttgcggcgtccgggtttatcctggtgtcgatcctgctggcgttgtggctgatgaccgccaagcaaccgctcacctccggcgcctgagccgtcagggcagggtggtgaatagctcgcgccgggcaccttcggtaatcgccacgatgccggggtgcttgaccttgcgttccaccgagatcgcgtagaacgactcggtcacggccacggtttggccgatcagcgccacgccgtactggcgcaccacctcgtcggcaatcacgctgggggcgataaagatcccgctgccggattggccgaatgcctgcatcaaggcgctgtcgtcgaactcgccgatgatcttcggttgaatctgttgctcggcgaaccagcgctgcaaacggctgcgtaccacggtttccgcgcccggaatcaatagcggcgcgccgtgcaggcactgcgggaaatcccctccgtattcgtcagccagggcctgggtggcgaaaaagctgatgccacattcgcccaacttctggctgtagcccttgatgtctaggtgcgtgggcatggggctgtcggaaatcaccaggtccaggcgctggattgccaggtcggccaacaggcgttcgagtttgtcttcgcggcaggtaatgcggatcggctcgctcaactccatggtcggtgcgatcagccggtagacgatggacttgggcaccacgtccgccacgccgacgcggaacaggatctgctgttcgtcgggctgcgcgcgcagcatcgcctccaattcattgccggtctggaacatctgctcggcatagggcagggcctggcgcccggcttcggtcagttccagctgccggccaacgcgctgaaacagcgcgataccgaaggtttgctccaacaggctgatctgcccgctgatggtctggggcgtgaggttcaactgctcgcacgcacgcacgatgctgccggtcttggccaccacccagaagtagtgcagttgtcgataattgagcatgctcaccatcacatcgtaaaaatcgaagtatacgcgagaaaaatacgaattttactgaactgtttgcctgcatagaatgcctcgctatcgcggggccactatttggacccaagagttctaacgaggaagacatcatgaaactcaattctctgggcgcggcatccttgcttgcgctttcattggtagtggtcagtggttgtgatcaggtcgagaaaagcgcacagcaggtgttgggcaaggccaccgaatcggccaagcaagcgatcgatgacacccacaaggctgccgaacaggcattgagtgaagcgaccaacggcctgatcaacccgcagaagaaggatgatcaggaagagaacgaaaccgaatcgaacagtaaagaagcctaaattcccgctcaacgtcaggactgacctatggattaccttttacaactggccgccagccccaccgcctggattgccctggcaaccttgatcgtgatggagatcgtgctgggcatcgataacctgatcttcatctcgatcctcaccaacaagttgccagaaaagcatcgggccaaggcgcgacgcatcggtatcagcatggcgttggtgttgcggttgggcctgctcagcaccatcgcgttcatcgtgcaactgacggcgccggtgttcgaagtgttcggccaggcgttttcgtggaaggacatgatcctgatcgccggtggcctgttcctggtgtggaaggccactaccgagatccatcacagcatggacccggagcctgaagagaaggaaaccaacgccggcaacgtcgtggctatcggctttgccgcggccatcgggcagatcctgttgctcgacctggtgttctccatcgacagcatcatcaccgccgtgggcatgaccgagcacttgccgatcatgatcattgccgtggtgacctcggtgatcgtgatgctggtggcggccgaaccgctggccaagttcatcaacgacaacccgaccgtggtgatgctggccctgggcttcctgatcatgatcggcatgaccctgatcgccgaaggcttcggcgcccatgtaccgaaaggctacgtatatgcggccatggcgttctcggcagccatcgaatgcttgaacattgcccggcgtaaccgccaccagcgtttgctcgctgcccggcagtaaccgctgaaaccaaacggccggctgcgctcagatgagtccagccggctttttgctgtctgttagaattcgcgcacttgatagcgtgaggtcctacatgaacgagccgattcgtcttacccagtacagccacggcgcggggtgtggctgcaagatatcgccccaggtgctggaagtgatccttgccggcagcggcgcacagaacctcgaccccaagctgtgggtgggcaacgcctcgcgtgacgatgcggcggtctacgccatcgacgacgagcgcggcgtggtctccaccaccgactttttcatgccgattgtcgatgaccccttcgatttcgggcggattgccgccaccaatgccatcagtgatatctacgccatgggcggcgatccgctgatggccatcgccattctgggctggccggtgaacgtgctggcgccggagattgcccgcgaagtgatccgtggcggccgttcagtgtgcgacgaagctggcattcctctggcgggtggccactccattgatgcacctgagccgatcttcggcctagccgtgaccggcatcgtgcaaaaacgccatatgaagcgcaacgacacggccaccgccggttgccggttgtatctcaccaagcccatcggcatcggcatcctcaccaccgccgaaaagaagggcaaattgcgcgaggcggatatcggcctggcccgcgactggatgtgcactctgaacaagcccggcagccgtttcggcaagttggcgggggtaacagcgatgaccgatgtcaccggtttcggcttgttgggccacctggtggaaatggctgacggcagcggcgtgaccgcacgtatcgaatacgccaaggtcccacgcctggccgggatcgaggactacctggatcagggctgtatgcccggcggcactttgcgcaacttcgatagttattcgagcaaggtgggacgcttgcaggaactgcacaaacgcgtgctgtgcgacccgcagaccagcggcggcctgttgatcgccgtcacgcctgagggcgatgccgaattccacagcgtggcgactgaactgggcctggtcctggaacctatcggcgaactggtcgagcgacagacccacgcggttgaggtgatttgatggcaaccgatatcaccgactaccgcgacattttcctcaacgaccggccgatgatggatacccgcgcgccggtcgaattcagcaagggcgcgttcccgggggtgatcaacctgccgctgatgaccgacgacgaacgccagcgcgtcggcacctgctacaagcagcagggccagcaggccgccatcgtgctcgggcatgagctggtttccggcgcaatcaaggccgagcgcatcgagcagtgggcgcggttcgcccaggccaaccccgagggctacctctactgtttccgtggcgggctgcgttcgcagatcgtgcagcaatggctcaagaccgaagccggcatcgagtatccccgtgtcggtggcggctacaaggccatgcgtacgtttttgctggagaccgtcgagcacgccgccacgcagtgtgacttcgtgctgctgggcggcatgaccggtactggcaagaccgaagtcctcggccagttgcgcaatgccctggacctggaaggccacgccaaccatcgtggctccagcttcggcaagcgcgccacggcgcagccgtccaacatcgacttcgaaaaccgcctggccgtggacctgctgaaaaagcgtgccgcgggtatcgagcagttcgtggtcgaggatgaaagccgcatgatcggcagttgcgcgctgccgctggcgttgcacaagggcatgcagacgttcccgatggtgtggctgcaggacagcgtagaggggcgggtcgagcgcatcctgcgcgactatgtggtggacctgtgcgccgaatttgtcgaggtgttcggcgatgccggccaggcgctgttcgccgagcgcctgacccagagcctgggcaatatccataagcgcctgggcggcgaacgcttccagcgcttgcaggcgatcttgcaggcggccctggcggagcaggcccgcagcggtgatgtgcacctgcatcgcgcctggatcgaagggcttctgcgtgaatattatgacccgatgtacgccttccagcgtgaaagcaaaggcgcacggatcgagttcgcaggggagcagggcgccgtggtggaatatttgcgcgagcgcgcgctgatcagaggatagccgcgccgatcaacccacacaccacccccaccaacatcgttaagcctgccaccgtcaccagcacccgcgcatcgaagtccttgcgcagcatcagcagggacggcaagctcacgctcggcagggtcatcagcaaggccacggccgggccggtgcccatgcccagggtcatcatggtttgtacgatggggatttcggcagcggtgggaatcacgaacaacgtgccgacaatcgccagcggcaccagccatactaggctgttggccatggcgccgtcgacatgggggaatagccacacccgtgcggcacccaggatcaacacggccaggatgtacaccgggatcgtgctccagaacaactgccacagggtccgcagccaacggccgaggaacggctgggactcaaccgcgctgacctcggccactgcgcccagcgccgcttccggcacctggtccgggcgggcgatacgttgcgcgatcagcgacacgcccaccaccagcacaatgcccgccaccagccgcaatgcggtgaagccccaacccagcacaaagcccatgaacaccagggtcgccgggttcagcaccgggttggcgatccagaacgcgagtgccgcgcccaccgatacctgctgccgacgcatgccggccgcgaccggagccgcgcagcaactgcacatcatacccggcagggcgaacagcccgccgcgtacagtcgaacccagcccggcacggccgaacaggcgcagcagccagtcgcgggggatcagcacttgcaggagggagcccaggatcaccgccagcacggcagccttccagatcgccaggaagtacacctgggcatacgccagcgcagccgccagtggcgagctttgctggtcgttgagaatcgaggcgccaatgctgtggttatcggcggcgacgaaggccttgaagtaatagggcgaccacttcacgtagtagaggccgacgcaggcgaccagcaggaacagcgctggtttccaccagaacgaccagccccggttgggctgggtggaggcgaggttgggcatggtgatgatccgcagatgagtcaatagcggcgcatcatacgccctcagctctcggcgctcacctgggtaggttgcgggcaggtttcttcgccattgttcaggccctgcttgtagttgcggctcagcagcgaggccttgccgttgtgccaggtcagtgtcagcacatacagcgtgtcgtagtcgctgccggaccagtcgtcggtgatggtgtgtttttcgccggacgcttcgctcgccaccttgttgatcagctccggcaggtagccgtgggaccaggcggtgtagatgatggagttgtggtacttgtcttcgaccagctcgtcggcgagggcactggtgtcattcgcggaaaacttgatgttgaccggcaggccgagcttgatcgcgctggggctgatggtcatcagcgggcgaatatagctgtaggaattgtccagctcgccttcctccacattgcgtgtcgggttggcggcgaagacgaaattggccttgccgaacttttctggcaaaaccgtggccaggttcatcgcccggttgagaccctggcaattgagctggcccaggccaccggcgggtttttcaccgtggcgcaggaagaccagggtttgcacgccgtcaacctggtcggcgttgctgatccgtgactccaggctcagatcgatagcgccgccgaccaacaatagcggcaacaaaatgtaggaatagcgtttcagtcgttgtactaggcgcagaggcttgatcgtcattgtaggttcgagtcttcatgcgtcacgttaaggcagacacgcctggccacgatgacgcctggggcgcctgcggtgttccatgtcgaaataacgaggtgcctccattcaccgcttgagcgcagttaagagtgcccaagggcgtattggttcgccctaacgggataatagccagcagttgttgcgtattgatgacccatgcaggacgctcgccagatgactatcatgggggctttcagcacacacatagggcttcccgatgaacccacttgccgctttcccgatcaatagcaaatggcccgcccagcatcccgagcgcctgcaactgtactcgctgccaacccccaacggggtaaaagtgtcgatcatgctcgaagagctcggcctgccctatgaagcgcataaagtcagcttcgagacccaggaccagttgtctcccgagttcctgtcgctgaaccccaacaacaagatccccgcgatcattgaccctaatggccccagcggccagccgctggcgttgttcgagtccggcgcgatcctgatctacctggcggaaaaatccagccagttgctctccgaggacccggcgacacgttatgaaaccattcaatggctgatgttccagatgggcggcatcggcccgatgttcggccagctgggcttcttcaacaaattcgccggcaaggcctacgaagacaagcgcccgcgtgaccgttacgccgccgaatcccggcgcctgctcgacgtgctggaaaaacgcctgctgggccgtacctggatcatgggcgacgagtacagcatcgccgacatcgccacctttccgtgggtccgtaacctgatcggtttctacgaatccggtgacattgtcggcattgccgactttccaaacgtactgcgcgcgctggatggtttcgtcgcacggccggcggtgatccgtggccttaatattccgagttgaagcatgccgactttcgatttcaaacagctggacgtgttcagccgcgtgccgctcaaaggcaacccgctggcagtggtgttcgctgccgacagcctcagcgaccaacagatggcggatttcgccaactggaccaacctcagtgaaaccacgttcttgctgacgccgcgtgatcctcgggcggactaccgggtacggattttcaccaccttgacggagctgccttttgccgggcatccgacgttgggcagttgttatgcctggctgcaggcagggggtgttcccaagggtgaggagataatccaggagtgcgaaatcggcttggtgcgtatccgtcgccaaggcgatgaactggcatttatcgcgccgccgttattgcgcgccggtgccgtggacgcgccgttgctggagcgtgtgcgcctgggcttgggcctggagcccggggtcattgtgcgcagtcagtgggtggacaatggcgccggctggctcgcggtgatgctggcagaccgcgaccaggtcctggcgttgcagccggactatgcgcaactgttggggctggccgtgggtgtgatcggcccctgtgaagccgggcgcgacgatgtggacgcgcaatttgaagtgcgtgcctttatcgccggcgacggcgcccaggaagacccggccaccggcagcttgaacgccggccttgcgcaatggttgctcagcgagggcctggcccccgagcgctacgtggtcagccagggcacggctattggccgggcagggcggatcggcgttgagcgccagggcgatgaaatctggatcggtggtgctgtttcggtgtgcatcgacgggcgtgtacagctctagatcaataaattgttaccgcccacgcaatacactattggcccctcggcgtttgtgctgccggggcctgggggcataagctttcgccccaaagattttctgccttgcgataggaccaccatgaccagccagttcccccaagcccgtccacgccgcctgcgccgctccccggagctgcgtggcctgttccaggaaaccgaattcaccctcaacgacctggtgctgccgattttcgttgaagaagaaatcgacgacttcgtgccgatcaccagcatgccgggcgtgcagcgcatccctgagaagaaactggccggcgagatcgagcgttatgcccgtgccggcatcaagtcggtgatgaccttcggtgtgtcccaccacctggacgccagcggcagcgacacctggaaggagcgcggcctggtctcgcgcatgtcgtcgatcatcaaggatgccgtgccggaaatgatcgtgatgtccgacacctgcttctgcgaatacaccgaccatggccactgcggtgtgatgcacggcgcccatgtcgataacgacgcgacgctggttaacctcggcaagcaggccgtggccgctgcccgtgccggtgccgatgtcattgccccttcggcggcgatggacggccaggtccaggcgatccgccgcgccttggacgatgcgggcttcacccatatcccgatcatggcttactcgaccaaattcgcctcggccctctacggcccgttccgcgaagccggcggcagtgcgctcaagggcgaccgcaagagctaccagatgaacccgatgaaccgccgcgaagccgtacgcgaatcgctgctggacgaacaggaaggcgcagatgcgctgatggtcaagccggccggtgcctacctcgacatcatccgcgacatccgcgaagcctcccgcctgccggtagcggcgtaccaggtgagcggcgaatacgcgatgatcaagttcggcgcccaggccggggcgatcgatgaggaccgtgtggtgcgtgagaccttgggctcgatcaagcgcgcgggtgcggacttgatcttcacctacttcgcgatggacctggcgttggccgggatctagaaccacaacaggtaaaatgtgggagggggcttgcccccgattgcgttggatcagtctacacatacagtgactgatactccgtcatcgggggcaagccccctcccacgtcaaccatgcccggcccgtcgtcgcccaaggaagccccatgtatccacgccgcctgatcctgtgccttgccacgtcgctggtactggccggttgctccaccacgcgcaacccgcaacagccgcagcgcagcgaggccgaggtgaaggcgcaggtcgtgcgcctgctgccggtcaaggtggctgatcgcgagggctgggcccaggacatctacacggccttcaacacccagaacatctaccccagcacggaaaacatctgcgccgtgctggcggtgaccgagcaggagtcgacctatcaggtcgacccgccggtgcccaacatgggcaagatcgcccaggacgaaatcctgcggcgtgccggcaaagtccatgtgccggcgtttgtcgtgcgcagcgccctgcaactgcgctcacccagcggcaagacctacgccgaccgcctcaatgctgcgcgcacggagaaggacctgagtggcatcttcgatgacttcatcagcatggtgcccctgggcaacacgttgtttggtggtttcaacccggtgcataccgcaggcccgatgcaggtgagtatcgactttgcacagaaacaggcgcggagttatccctacacggtggatggcacaattcgtcgcgaagtcttcacccgtcgtggcggcatgtacttcggcatcgcgcacttgctgggttacccggtgagctacgaccggccgctgtatcgctttgccgatttcaatgccggttggtacgccagccgtaatgccgcgttccaggctgccgtcagccgcgtctcgggcaccgaactggccctggatggagatctgattcgctacggctcgctgctgcccggcaccaccgagttggcggtgcgttcattgggcgcgaagctggacatgcgcaaccccagcatccgtagccagctggagcagggcgagcaactggatttcgaggaaaccaccctgtacaaacgcgtgtttgccctggccgacaaggccgccggcaagccgatgccacgggccatcctgccgggcatcgtgctcaagagtcccaagatcacccgtaacctgaccacggcgtggtttgcccagcgggtggatgagcgctatcagcgctgcctgaagcgctgatcaggtgcggcgtttgacaaaacgccgccacagccacacccacaaccacagcaccgggaacgccaggatcacgaacggcagcacatagcttgatcgctccaacgcgtcggcggtgccgtcgaccaggttgtcgcccaggttgctgaacaccctgctgaaccgtgattgctgattcgcaccatcagaggagcggaaattcagcgtcacccggttagtgtccaggcgacgttgctggctggcagcaacctgggccagttcctgtagctcgttttctatgccggcctgttccttgctcaaggcgatcaggtcactgacggtgatgtccttgcgcttggccaactcatccagtcgttgttgttgagcctgcaggcggtcctggcggcggcgtacgtcggcgacggcatcggccaggtcctcggcggtggtgatgcgctggccgagtgtgccgccttcagccgccatggcgaccatcggttcgacaccggttggcgcgatgcgcaggatgatctggccgccactgccgtcttcggtgatgccgaggatattgcaggcgccaaagcgcgcggtttcgcaggcttcgcgggtggcctgcatgcgcggcgcgagcagtgcaccaggcagggccaggctcagctcatgctcgtaggccagttgcgcgcccgcgcggctttgttcgccgttgattacccgtgcgcgggactgatccttgggcgaacagccggcaacggccagcgctgccagcaggaacaggagatagggttttggcttgccgtccagatggcgcattgcgattccttggcaggtacgggggaatttgacggcgattaaagcgggtctgatggattaacgcaaagcatcggaggggatttgtgcggctgatggtgatggccgttgtctggcgccaggcgtacacctcaagcctgacaccaaggaagaattcgccatgatcgctcacgccgtgcccgaagggtttgtctcgttgccccgcagtagcccgctgcttgacctgcttggcccggcgtattgccggggagaagggctgcaactggaaatcggcctgcgtgccgacaaccgccacgccaatgggcgcggtaccgtgcatggtggggtgttggcaaccctggcggatatcggcatgggctacgcgatggcgttttccagtgagccgccgctgccgctgattacggcgagcatgaccgtggactacctgggggcggtgcaggtgggggagtggattgtggtgcgcctggagcatcacaaacgcgggcggcagatggcgtttgccacggtgagcctgcaggtgggggagaaggtgatggcgcgggcgaatgcggtgtttgcggtgccgcagacgcgagattgaagggtaaagaaaaggcctggttttcgtggaaccaggccttttctgcgttgctcttttttctagagggctgctgcgcagcccgacgcggggcaagcccgctcgccacagcaagctagctcaccacggcgagcctgcgcctaccgtcaggcgcgttcgagggcgagggctacgccttggccgccgccgatgcacagggtcgccaggcctttcttggcatcgcgcttgatcatttcgtgcagcagcgttaccagcacgcggcatcccgaggcgccgatcgggtggccgatggcgatggcgcccccgttgacgttgaccttgtcggcgtcccattccagctctttgcccaccgccagggattgcgcggcgaaggcttcgttggcttcgatcaggtccaggtcgcccaggctccaaccggctttgtccaggcaacggcgggtggccgacaccgggccgatgcccatgatcgccgggtcgacgccggcgttggcgtagctggcaatgcgcgccagtaccggcaggccgagggccttggccttgtcggcgctcatcagcaacaccgcagcggcgccgtcgttgaggctggaggcgttgccggcggtgacgctgccgtctttcttgaacgccggtttcagcttgcccagggattcggcagtggtgccggcgcgtggctgttcatccacggcgaaggccaccgggtcgcctttgcgctgggggatcaggatcggtgtgatctcatcgacaaaccgccccgcctcgatagcggcagcggctttctgctgggaggcagcggcgaacgcatcctgggcttcacggctgatgccgtacttgtccaccaggttctcggcagtgatgcccatgtggtaatcgttgaacgcgtcccacagcccatcggtgatcatgctgtcgatcatcttggcgtggcccatgcgcaaaccggtgcgcgcggcgggtagcacgtacggagccaggctcatgttttccatgccgccggcgatgattacctcggcgtcgccgcaacggatggcctgggcgcccaggtgcagggccttgaggcccgagccgcagactttgttcaaggtcaggctgggcaccgcgtggggcaggccggccaggatcgacgcctggcgcgccgggttctggcctgagcctgcggtgaggacctggccgaggatcacttcatccacttcggccgggtccaggccggtctgctccagcaggcgacggatcacggcggcgcccagttccggtgccggaatgttcgccagcgaaccctggaagctgcccacggcggtgcgggtggcagcaacaatcacgacgtcttgcatggaatctgtcctcactggaagtgcatttctggaacgtggtccgggacgatcagtttaccggcggtcttgctcactatctcttcaacgctgacgccaggtgcgcgttccttgaggacaaaagcgccattttcgatttccaggtacgccaggtccgtcaatacgcgcttgatgcagtgggcgccggtcagcggcaggctgcattggctgagcagcttggactcaccgtccttggacgcatgggtcatgatcacgatgatgttttccgcaccggccaccaggtccatggcgccgcccatgcctttgaccagcttgccggggatcatccacgaagcgatgttgccttgtacgtcgacttcaaaggcaccgagcacggtaaggtcgacgtggccgccacgaatcatcgcgaacgactcggcggacgagaagatcgacgcgccgatacgcgcggtgacggtctgtttgccggcgttgatcatgtcggcatcaatggtttcttcggtaggaaaaggacccatgcccagcaggccgttttccgattgcagcatcacttccatgccttcggggatgtagttggccaccagggtcggaatgccgatgccgaggttgacgtagaagccgtcctgcatttcgcgggcgacgcgttgagccatttgttcgcgggtaagagccattttatgtgtccttattgttcgggctggaggcggattacttgcgcacggtgcgctgttcgatgcgcttctcgaacgtgccgcagatgatccggtcgacgtagatgccaggggtgtggatctgcgccgggtccagctcgcccggttcgacgatttcttcgacttcgaccacggtgatcttgccggcggtggcggccaacgggttgaagttctgggcggtgtggcgatagatgacgttgccgaagtggtcggctttccagcctttgacgatggcgaagtcgccggtgatggattcttccatcaggtacgggcgaccgttgaattcgcgggtttccttgccttcggcaaccggggtgccaacgccggtggcggtgaagaaggccgggatgccggcgccgcctgcgcgcattttctcggccagggtgccttggggggtcagcaccacttcgatttcgccgctgagcagttgcttctcgaacagggcgttttcaccgacgtaggaggcgatcaccttgctgatctgtttttgctccagcagcacgcccaggccaaagccgtcgacgccgcagttgttggaaaccacggtaaggtcgcgggtgcctttgcgcttgatctcggcaatgaggttttccggaatgccgcacaggccaaaaccgccggagagtacggtcatgccgtcctccaggcccgccagtgcttcctcgtaggacgccacgcgtttatcgaaacctgccatatgcacctcttttattgtttgtgggccagccaatgaatcgagtgttgctccgtcggattgatttgttaagttgttttttaaggttgattgatttaaaaaacagcatagttgcctggccgtttggagtagcgtcatgacagttaaacagatgcgcgcgtttctcgctgtggcccagagcctgagtttcgccgccgcctgcgagcgcctgcacctttcacagtcggcgctgagcctgaccatcaagggcctggaagaaggcctgggtgggcggctgttcagccgtaacacacgcaatgtcgcgttgacgcccgaaggtgaatcgctgctacccctggcacgccggctcattgccgattgggacaatgccgaggacgaactgcgccagcgctttaccctgcaacgcgggcgggtcacggtggcggcgatgccgtcgttcgcgggcaacctgctgccgccgatcctgaagatattccgcgcgcgttaccctcaggtgaatgtcaccgtgcacgacctgatcaacgaacaggtgctggaaatggtccgcgaccgccaggtggagctgggcgtggcgttcgagccttcagacggttcgtcgctggcgttcacaccgttgtatctggatcgcttcattgccgtggtgcccggggattcgccgttgattgagcttgatgaaatcgactggaaaaccttgctggagcagccgttcatcactttgcagcggccgtccacggtgcgggtgatgttggaagagcaccttggtgctctacagatgaagctgccggtagcgctggaaagccatcaactggcgaccgtaggcaagatggtggcgatggggttgggtgtcagtgccgtccctgcattgtgtgcgcggcagatggaggaggcgggggctcattgcatcaccttgcgtgatccggtgatcgaacgaccgattggggtgctgaccaaacccggtcatgaactctcggcggcagcgcaggtgttgtttgatatcttttgcgacgaagcgaagaagggacgatttcccgcagtgtgatagagccgaaattaaaaagcccgctcgaatgaacaagcgggcttaagtagttaatgcggtgttatcagcagtatctatcaatcactttaacttgcgattggcccttgaggttctgccattcggtattaagtgtgtggaagacctgttcgataaagttgcgatcggcggccgccttcttgccgacataaccctggccacggcggtacatcttcaggcgcgccgccagttcacggttattgcggtcaaactcggcttcttcggtgtggggcgccaggcagtcaatttgcacttcgcccgatttgccaatccacaggatatggtcgtcgagtgtgtctttctgcgctgcgaacatctcagccaattcatcgatagttggttggttgttcagattcatgtgtaagccccttgaccagttggcgatctatcagttggttcgttaatacttcgtaagttgtctccggttgcgaaaaccgggcgtcagcgactgtctgccgaatacgggcagggtcttgaacctgatgcatgtagtcttgctgatgaactgctacgcaatgctttcataacgaagacaagccgcatttgagcgccttgtaccgaacccttcgggccggtcagcttcatcaatccgccttgtgggcagtgcacatccggaaaaaacagctcggcggtcagacgagcttgttcaaaacgcttgttgccaacgctcccgatccgggagacgtctcgataatgcaaggacaaaatggttacgtcaacggttatgtagtgattatttttgctcactacataaattgccgtggggacgggagaatgcgggaaagcgtgacttgggcgtcattttctggaagtacaggtcaggctgtctaacgcctgttgtggcaagcccactcaccacaacaagcccgctcgccacaaaggacctgcgcttgattgagttaccgtaaccgttcgaccaaacgcggcaaaagccgctcgcattcggcttcgatcttcacctgcaacaactcatccccccgagtcttgcccaagttgatggcaatgaccggcttgccctgttcgaccatggccttgcacaagcggaatgccgaataggccatcagcgacgaaccgactaccagcaagccttcggcatggtcgacggcggtcatggctctggctgctgtcgccggtgctacgttttcaccgaaaaacaccacatccggcttcaagcgctcgccatcgcaatgggggcagtgggggacctgaaagtgttcttcaaaggcaggatcaagcaacgtgtcgccatccggcgcctgcaccgcatggacctgcgcaaggtaggggttgtcgatttccatccggcgctggatcacatcgcgtgcactgcgcaaccggcaatccaggcacagcacccggtgcaggctgccgtgcagttcgatcacatcgtggctgccggcctgatcatgcagggtgtcgacgttttgcgtgattagcccgctgatacgcccgtgttgctgcagcgtcgccaacgccaggtgcgccttgttcggctgcgcaatgcgaactctcggccacccgagcatcgcccgcgcccagtaacggcgacgtgcctgcgcggtggcgaggaactcctggtacatcatcggcgccttgccccggcgcacgccttcactgtcgcggtagtcgggaatgcccgacgacgtgctgatccccgcaccggtcaacaccagaaagtgccgttcggccatggcccgatgcaaggtgtcgaggtgatcctcttggtgttccagggtgtcgagcatgggttcccctattcgccgcggatgtactgctccagctgtctgatcaggtcagcctggtcggcaatggcttccttgaccaggtcgccgatggacagcagccccaacagcttgccgtcttcgaccacgggcaagtgacgcaggtggctgtcggtcatgatgttcatgcactcatcgacctttttgtgggtgtcgacggtgataaccggggaactcatcacctcatgaaccttggtggtgaccgacgacaggcccttgagcatgattttgcgggcgtaatcacgttcgctgatgatcccgaccaccacgccatcctgaaccaccggcaaggccccgacgtttttctccgacatccggaccagtgcttcaaacacggtgtgatcgtgtttgatgacatggacttcctggtttttctggtccttggctttgagcacttctgcaacggttttcatggtggccactccggtattgttgttggttagtcagggtcccactacagaatcctagaccggccaccgcgctgcaaggtccaaagcggcgctaaacccgtcaaaaaacgtcattcaccggtttttttcagtgtttaccccgcatttgtcggttttttggcccgcttggggctggctgccgtcttgcgcggtgcgctcttgcgtttctttttccatggcgtggcacctcggcctgccgggctggcgggaccggtgatggtcatgcgcatgccattgcagcgggcgacctgcttgctcatccaggccgcctgtttggcgacgaagtcttccaggctcatttcgccgctttgcaccatgtccagggcctgctcccagatggcggtggtgcctgggtcggcgatggcccggggcacggcgtcgatcaggctgaatgccgccggagtggctgatagcgccttgccgttcttcaccaggtaaccacggtccagcagcccctggatgatgccggcgcgggtggcttcggtgccgatgccggtggtgtccttgagtttttgcttgagcagcgggtcttcgaccagcttggcgacgttcttcatcgccttgatcaggtcaccttcggtaaagggtttgggcggttgggtccataggtccttgaggttgaccttgtccacggcatagtcctggccttgcatcaatggcggcagggcttgcggagccggtgcttcacgtcccttggccggcgccagggcttcgggcagggcgcgtttccagcctggttcgatgaccactttgcccactgcacgcaacgcaaaacctgcgcaatcgaaatccgcctgggtgcgatcgtactcatgattgggcaggaactgcgccaggtagcgtgcacgaatcagggtatacaccgcccggtgcttgccggtgagttgtcccacgtccttgccggcgccggtggggatgatgccgtggtgggcgctgaccttggcgtcgttccacgcccgcgagcgtcgctggggatcaatatgcggcatcagttcgttcactgcagtatccgcgcgcgccaacgcagccaggatcttcaatgcgtcgctgtgctggctcatcggcaagtagccgcaatcactgcgcgggtaggtgatggctttgtgggtttcatacagcgactgggcgatatccagggtttcctgggcgccgaggccgagcttcctggaacagatttcctgcagggtgcccaggtcgaagggcaggggcgccacttcgcgcatgcgttcggtgcgcagcttcaccagccgggcgctggcggcgttggtcatggcgtcggccgcgtcccgcgccaactgcgggttgaggcagcgaccctggtcgtcacaggcgtcctcggccgcgcgccattgggcggtgaaagtcatgcgttcgtggtgcaggtcgacgtcgatggcccagtaagccaccggcacaaagtcggcgatgctgcggtcgcggtccaccaccaggcgcagtgtcggcgtttgcacccggcctacgggcagcacgccctggtagccggactggcgcccgagcaaggtaaacaggcggctcatgttcatgccgatcagccagtcagcacgggagcgacccagggccgagtgatacaggctgaaggtctccgcgcccggtttgagcgccccgagggccttgcggatcgaggcatcatccagcgccgacagccacagccgctggatcggcccacggtagcggcaatgctccaccagttcgcgcgcgatcatttcgccttcgcggtcggcgtcggtggcgatcaccagcgcctgggcttcccccagcaggcgcttgaccgccttgaactggctggcggtcttgggtttgacgcgcatcttccatttttcagggacgatgggcaggtcggccagtacccagcgcttgtacttttcgtcgtaggcatccggcggggcggtttccagcaggtggccgatgcaccaggtgaccgtgaccccattgcccagccagcacccgtcgccacggcggctggcgccgagcacggccgcgatgtccttggcctgggagggtttttcacagaggtacagccgcatggtcgtcacatcagatcgggttgatgctgtgcaggatgctcagtcagcgcgcattgatcaaccattatctgtatggatgtacagcaatttatgtaggcacctgaaggcacatgtgggagggggcttgccccctcccacagcggatcttctgtgctcaggagatcggattagttgttatcgatatccacgtgacgggtctctttaaggcacaccatccccacgatcaaactaaccccggtcaccaccaccgggtaccacaggccgtagaagatatcgccggtgtacaccaccaaggcaaacgatacggtcggcaggaacccgccaaaccagccattgccgatgtggtagggcagggacatcgaggtgtagcggatgcgcgtcggaaacagttccaccatcaacgccgccagcgggccgtagcacatcgcggcgatcaggatcagcgccacgatcagcaccaccaccatggtcttgttgacctgggccacatccgccgaagacgggtagccagccagggtcaccgcgccacgcagggctttttcgtcaaaaccgtcgatacgcacttcgcccacgctcacctgcaccgggctgccggcgggtgcggcggcgctgctgtagggcaggccttgcttgaccaggaaggtcttgaccttgtcgcacgggctgtcaaatttcgccttgcccaccgggtcgaactggaaggtgcaggtggccgggtcggccatcacggtgatcggcgcctggttgctcgccttgtccatcgctgggttggtgtagtgcgccaggctcttgaagatcgggaagtacagcacggtggccagcagcaggccgagcatcagcaccggcttgcgcccgaccttgtccgacagccagccgaagaagatgaagaatggtgcgccgatcaccacgctgatgatcaacagcatgttggccagggccgggtccattttcaggaattgcgtgaggaagaacagcacatagaactgcgctgcgtagaaggtcactgcttgcccgccgttgatgctgaacaaggcgatcagcaccaccttgaggttttcccatttgccgaaggactcgcggatcggcgatttgctggccttgccttcctctttcatcttcaggaacgcgggcgactcgtgcaggctcatgcggatccaggtggaaatgcccagcagcacgatggaaaacaggaacggaatgcgccagccccacacttcgaactggtcaccggtgaagtagcggcaggccagcaccaccagcagcgacagcagcaggccgatggtcgcggtggattgaatccaactggtgtggaagccgcgtttgccggccggtgcgtgctcggccacgtaggtcgccgcgccgccgtattcgccgcccagcgccaggccttgcagcatgcgcagcacgatcaggatgatcggtgccgcaatgccgatgctggcgtaggtcggcagcaagccgacacagaaggtcgccacgcccatcagaatgatggtcaccaaaaaggtgtacttgcgcccgatcatgtcgcccaaccggccaaataccagcgcaccgaaggggcgcaccacaaagccggcggcaaaggccatcaaggcgaagatgaacgccgtggtgtcgttgaccccggcgaagaactgcttgctgatcaccgccgccagggcgccgtagaggaaaaagtcataccactcgaacaccgtccccagggacgaggcgaagatgaccttctttgagtcgttgctggtgctcgcgtcgatcgacgagcccaggggttgagcatgttctgacatcgggtagccctcacagtgattatttattgttgttccactgtcggcgccaggttcggcgccgctattcagattgcatgaaccagttctttctccggggcgagactccttgtattcggcgaaaggatcagctgcgcggccttctccgcgatcatcagcgtaggtgaacaggtattgccggacgtaatgcgcggcatgatcgacgcatcggcgatgcgtaaaccgggcacgccgtgcacccgcagttgggcgtcgaccacagcgtctttatcgctgcccatgcggcaggtgccgaccgggtggaagatcgtcgttccgatgcgtgcggcggcttcgtgcaattgcgcttcggtttgcagcgcatcacccggcaggtattccaccggcttgaactggctcagggccggtgcggcgacgatgcggcgcgtcaagcggatggcatcggcggccacgcgcaggtcttccggatggctgaggtagttggggcggatcagcggtgcgtccgccgggttggccgagcggatgtcgatacggccccggctctgcggacgcaagtcgcagaccgaagcggtaaacgccgggaatgggtgcagaggttcgccaaatcgctcaagcgacaacggctgcacgtggtactccaggttggccgaggtctgttccgggccggagcgggcaaacgcacccagttggctgggcgccatcgacaacgggccgctgcggtcgtacaggtagcgcaggcccatgcccatcttgccccacagggtgccggcgatctgattgagggtacgggcgttttccagtttgtagatcagccgcagttgcaggtggtcctggaggttgccgccgacgccgggcagctcgtgcaatacattgatgcccaacggtttgagcacattcgaagggccaattcccgagcgttgcaggatgcccggcgaacccactgcgccggcgcacagtacaatctcctggcgcgctttccagctcacttgctggccctgctgacgcccgaccacttgggaggcacggccgttttccagcagtacgcggtccacctccacttcggtcagcacggtgaggttggggcgctggcgcaccggcttgagaaacgccttggccgcgttccagcgcaccccggctttctggttgacctgaaagtagccgcagccttcgttatcgccctggttgaaatctttgatgttggcgatgccgctctgcgccgccgcatcgcggaacgcatcgaggatcggccagtgcaggcgctgctgctcgacccgccattcaccgccgtcgctgtgaaactccgagccgccggcaaagtggttttcgctctgcttgaacagcggcaacacgtccttccacgcccaaccttcattccccgcagcggcccagccgtcgtaatcctgggcctggccacgcatgtagatcatgccgttgatggacgagcagccgcccagcaccttgccccgtggataactcagtgcacggccttgcaggccttcctgggcttcggtcttgaagcaccagtcggtgcgtgggttgccgatgcagaacaggtagccgacggggatgtggatccaggggtagttgtcgcggccaccggcttcgagcagcagcacgcgatgtgcggggttggcggacagtcgattggccagcaggcagcccgcggggccggcgcctacgacgatgtaatcgtattcagcagttgcaatgggcatctgaaggtctcgcttgtttttcttattggccccatcctagttgttagttttcgtcttaaaaatgttagtttttgcccagctgctgtgcgtttttaaacagtgcagcccagggataggcaatggaggcgtcatgttcgactggaatgacctgcggtactttctcgagttgcagcgcagcggtcgcttgctcaccgccgcgcaacgcctgaaaaccacccacgccactgtggcccggcatatcgaggcgatcgagaaaagtctcggcaccgcgctattcgtgcagcatgcccagggctacgaactgacccccgccggcgaggccctgctaaaacatgccgaggccatggaaaacgtcgcactgctggccgaagacgagctgactcatgctgccgcgcccctgggcaagatccgcctgggtgtggccgaaggcctgggcgtgatgttcctggccagccgcatgggcgggctgttcgagcgctaccccgggttggaagtggagctggtggcggtgccgcgctttgtcagcatcctcaaccgcgaagcggaaatcagcattcacctcgagcggccgagcgtcgatcaactggtcacgcgcaaacttaccgactaccggctggccctctatgccagtcgcgcctacctggcgcgcaacccgccgattgaaaagcgcgaagaccttgcagcacacgcctggatcgattatgtcgacgacctgctgttcagccaggaactcaaattcctcagcagcttctgccgcaaccccaaggtggtgttccacagcaccagcgtgatcgcccagcatcaggcggcgcgctccggtttggggattgcggtattaccgtgcttcatggccgccggcgacccggacctggtgccgttgctgccgggggaggggatccagcgcagctactggatcagctcgcgccgggaattgcacaagtcagtgcggctgcgggtgttgtgggattacgtggtggagttgtgcgcgcgtgagcaaggcttgttgctgggcgaagccaactgaagaaaccggatcgataccgtggagtcattgaaccccgtcaggcacgcaactcaaactcggcactgcccagcctttccccattcacccacacatgcaccacatgccgcccagggtaatgcttgcgggttgtcatgtcgcgaatgtgctgttcgcgccgaatgtgctgctgttccccggcacccaggctgaacgccttgagtttgaataccttgtttgcactgtggccggcgcttttcacatagtcgatggcgtagtccaccaccagcttctgtggggctgtggcggtggattccagggtgaaggacagattgatccgctctcccaggttgatcaccgccggcgtcacttgcagatggtggatcttcacgtcggccctggccccggcccccatgatcgtcagcgcacgcgtgttgccttgcttgatcaggctgcgcagcgcgtggcgggcgatccaggcggtgtgagggttatccagattccaaccttcgatcaggctgagcacccactccgggtggtccttggtgatgtcgttgaggtggttggccactgatttgcgcacgtacaggctgctgtcggccttgaggttgtcgaggatcgacgcacacagttcggggttggcctgtacttcggccaggcggaacgaccagggcaagcgcggccgcgaaccttcgctggccaggcggcgcacgtgttcgttggtatccagcgaccattcgtgcatcaccgccaacgtgcgcgggaagtcgtgcagtagaaaatggcggatcgcgaattcggcggagccaaacgtcgtgaagtacttgagcgcggccattgaacgcttgaaatcatcccgaccgtaactcgccacgaagtgcggcaggaacaggctgacaaacgcgctgttcaagcgcggggccaacgcataaagcaccttgagggtttgcgggtagtccagtgggatcaccgcatgcaggctctcgctgacccgtgccatgcgctgcatcaccgacagctcggccagcccggccttggcgtgcttgagaaagcccttggcgtcgaacgccgggtacaccgccgtcatctcgctggcgatgtgttgcaggcgttcgacgttgaagatttccttgagggccggggcgctttggtcggtcatcggtgattccgtaggtgatgtcagagaaaccagcgatattcccgcgcatggatctcttgctggaaggccaggtggtcctggcgtttgttttcgcagtacacgtcgacaaattcggcgcccagcttatcgcgcaatactgcttgatgctgcatggcacgcacggcgtcgagcatttccagggggaagtcgctgccgctgctgcggtcttcattcagcggggcgatgggttcgcgcctggcttcaagaccgtgttccaggccgaccaggatcgccgccagcaccaggtacgggttggcgtcggcactggccaggcgatgttcgatacgcaggttgcgcgggtcggattcggggatgcgcacgcacgcgtcgcggtcttcaaagccccagctggcgcgggtggcggcgttgaccgtaccgcccaggcggcggaaggcattgtggttgggtgagaagatcggcatgcagtgcggcagcaattccaggcagccggccacggcatgacgcagtggttgctgctggtgtgccgccagcaaattgttacccgcgccatcatagaggctgacatgcacgtgcatgccactgccggggaattgcaggtagggcttggccatgaagctggcgcggtagccgtgtttcaatgccacgccacgggtactgcggcagaacagggcggcccagtcggcagcgcgcatcccatcgtcgaggtggccgaagttgatttcgaactggccggggccgatctcggcggtgatcacggtgatatcgatgccctggtccttggcggtttgcgccatgtcatccagtacttcgctgaagcgcgacagccgttcgatatgcaggttgggctggtcgtcggcatcatcgctcagcgggtcgcgggcaaattgcggcaggccgttgtcgagtttcttgtcgaacaggtagaactccagttcaaacgccaccaccgggtgaatgcccttgtgttgcaggcgttccagcaccttggccagcacttcgcgcggttcgaactcgatgggcgcctcggtgccgtccgaggtgatcagcatctggcccagcggctgcgactcccagctcaccggcttgagcgtgcccggcaccaggcggcggttggcatccgggtcgccgtcgttgaagcagtagtcgccaattttgaacaacccgccctgaacccccagcaacaccgcgttctgcggcagcttcaacgggctgccggcggcgactttttccagcatctcgatggggtagcgcttgccgtagaagtgcccgggaatgtccagggcgatcaggtcgacataacgcacgtccgggtgattctggcgaaaggtccgtacttcggccagtaacgtggaggcatggcttttcacgggtgttgctcctagttgtaaacccacaacacgcgggcgggcaggtcggtcaggttggcgtagcggcagtgggcgaaactggccaggtggaagctgtcgccggggccgagggtgactgagccgtcttcaccctccacccataacgtcaactcgccctccagcacaaaaccggcttgttcggcgcggtcgctcatggtctgttcaccgctgttggcaccgggggccagcaggctgtcgagcatcgagaaggcgccgttcatgctcggcgaaacgaggatgtcggtgatgccgttggcgtaatacaccgtgcgccgctcgttggggcgggtgatccagtccacggccttgggtttgggctggctgtagaagtaggtggtgggcacgtcgagggcgtggctgatggcggtcaagtcggccacggtcgggcgcgacaggccgcgttcgacctgggacaggaagcccaccgagcgctcgattttctgcgcgagctgggcgagggtgagcttcttgtgcttgcgcaggtcatggatcagcgcggcgagggtggcgagttcttcttggggtgtcatgaaatttatgtcgaataatttcatgaaaaactacaggaattatttcatgcgggcaatcggcaccttcaccgtagcaccggcattggggtccagccctttcaaggttttcaggtagaactggcgacaagtaccctgtggcgagcgggcttgtcccgcgttgggctgcgcagcagccccataaagatcaccgcagcgcatcaggtaacctgcggcgacaggttttggggctgctacgcagcccaacgcggggcaagcgcgctcgccacagttgcagtgttcgccctttatggaagggtatcagccagatagggccggtttttcaggggcggaagataaagggtttcacgccccaggtgcctgtcagttctacgccgccgaccaacagcagcaggttcccctcgtcgcgcgcttgaatcagtgcatcgcgcagggcataccgttgtccttccaggttggccggtgtgggtgcttgagggttgtactgtttggcggacagcttcggggagtgggtcttgcgcaatgtcagccaataccaggtcggtcggtctgggcgccgaaagatcaactcggtgctgtaccgcgagtcgaagacttcgtagtggctgtctgtcagcagttcgcgcatcagcgttttgatgttgatttgggtaggccgctccaacaggtttgaaaccaggacgggacgtaccccagccgtatcgaaccgtatgaggttgaactcatttgaaacccccaatgaccactcgaatggccctggccctctcggcaaggtgggcagcagtgccaacggatcgttcgcgatcagagtgtgccgctgggtcagtgtgccgacagcgcccctggtccattcggtccagtcctgcagggtgttgagcacatgcgcatagccttttgcggtcagcccggatgggttcgctgtgttgaacaggcttgcgccaacctgggcgcgggcgcgtgggtcgaagtggggaaacatgcggttcatgtgcgtggcaatcgatgagggaagcggcggctgcgggtggatgagccaggtgtccaagtgagcgttgtattccacgagcctgggttgttcaaacggcgcgttcgcgaccacgtgctcgaattgcgcgaatgtcgagtgaggctggtccgccgacacgatggcggttctcgcgccttgtgtggcgaatacgctatcgcctggcaggatcgcgtagtaacgcccgttgatcttgatgtagtcctgtagcgcctggctcggcgttgcctggcttcggcgccacacgcccgggcgccccggcacaggggtcatcgtctgtggcgcaaaggcctgcccccaatccacaaaacgctcggcgtcgctgcgcacagggcgctgaggcggcagggctggcctgcttggcccgggggcggggccgatggcggtgacggtttgggtgcccggcaggtcggtaccatgcaacctggaccagaagcggttctcggtggtttgcaggtacgcaaagcttagatcgagttggcttggcgcctggctcaggcggaacaccagggacatctggtgttcaaggttattgaacgcggggaaattgaaggattcaaacacccttcgagcctgttgcaggtccaggtgcggtaaaagatccatcaacgccctttccggcacggtagggggtgagccaccgaacagcccgatgagtggcgagcggatctcccaggctccttgaaccgtgcggtagagcggctcgcccgggtacgcactgggtgcgcgccgtgggtccttgagtcgccagacctgacgatcgtgatccctgcggatcgaataccagcggccactctcctgcaggaaatgccgaggcgcctcgaaggccccgggcgtcgccgtatcctgtacgtagatttgctggtcttcccatcctgccagcggcttgacgcccgtgggcttgctgcgcaacgccagcttcgggttaagtttggggccggttgcgatacctctactcgccgaacgcgcgccgccgatggcgccgtcgatcaccgcgcccaccatttcacccagggcccgcacaatgtattgggcggcggcggtgcggtcgccgagttgggcggcttccacggcattgatgatggacaggatgcttctggacaggccgatcggcagcatgaccttgaccggcaggaacaacgtggcgaagtccagtgccgcggtgacgagggtggcggcgctttcgaggttggcttcctgggtgctggtcgattgcgcattggcatcgttgatcacggcagacgcttcggcctggtaagcctcttccaggaagtgatcggcgatacggctcaaggcgatgaccgtttcattcgccccacctttgagcaggttgtggatgcgcgggcgggcactgagttgcacgcgggcagtcaggtagtcacgccaggcgctgtggttgatgaagtcgcggtgcatggccgacgcgtcggcgtattcgtggaacagccgaccgttggcggtgccgggggtatacaccaccagggaggcgacgctgtgggacgcggttgaaaacaccagcaccccgcgcacgcgttcaccgcgcagtttcaggctgctgacgatgatgcggtgctcttcgacggtggggcgtttatcgtcatccgtggggccggcgagggcactcattacccagttgtacccgcggtcgagccggtccggcaggaagtcgccggcgattttggcctcgatggcgtccacccgcagttgcaaggccatgagttgggcgtagcgatcctggtcggcgtgcgcctcgctggagctgaccaggcgcgacttgaggaattgctcgtagctgtcaccgatattgaccttgcgtaccagctccttgacttgcgccaccgtcagcgcggtatagggcgcctggtctttatcggtcagccaggcgaagtttgtgaagttgagatccagccactcaacgttttccagcgccaatgcggtcagggtcagcgtgcgtgtggtgtagaccggcgtgcctgtcgccggcggttgcggcttgccgccgaccacatagctgccggtggggcgggcggcgtaggttttggtgtggatgaggagggtgtccgggtcggtcaccacgccgtagtcggcctccagctgcctgcgcaactgctcattgctgtaggacagtacggcggcggggtcgctgaattgggacagggagggcagcccctcgggcatggacagccgctgcagctcatcggcgtattcctgtactgcgcttgtccagcgttgttgatcgccggggctcgcttgcttgagaaactgctggagctggcgccgcagtttcttctggtggcgggcgaccaggacgccactggcatcataggcacggctcagatcggtgacccggtcgaggcttgccggcaattgtcgtggggccaggccgtggggctgacgctggtagtgcgcaatcatccaggtgaagtctgcctgtgcccgctcatgcaaggcgtgcaggctatcgctgaacaccgactccagtcgttcgaggtagcgaaactggtcgccttgggggtgttgctggtgaaacgccaggccgctggcacgatcgttgtggctcatcagggccaggatgtcgccgaattcgatggcgctgttgagtcggcgatgcaattcacggtcaaggccggccagtgaatcgaaggcttcgaagccgctggtcgggaggtacaacagcacattgccgacgttggcctggggggcgatgtcacgcacttggagtggtttctcctcaccttcgaagcgcacctgggcgtcgtccgggtccctggccgtcagcacgaatgccccgtacagcgggatatcccgcgacagtttgtctttgaccgccacgcccaaggcgcagggtcggtagccgttcaaggcgcgtcgggaggccgcatccgggtagcgcatgacacgcaggagcagcagctcgctcgacacatcgagcaggctgtcgatcttcagcagttcggcttcggctctcatcagatccaggcgcttctcggccagccactgtttgctggtgcgggtatcgttggtgtcgatgggcgtcccccagaactgttcgacctgggtgttgaagcgcgccaccagggtgcttgccagcgtatcgagaaaaccgtcgaaggcctgcggggtgagtgccagtgccgagccgtagtcccgaccgtcgcaggtcaggtgaaagcgggtagcgtgcttggcgtagtgggcggagtgctgcgtgaccaatcgttccactgcggcctccatgagtgtcggcagcaacggattcaacgcttgagccggctcggtaggggacgcgtctgccgggttgatcttgaggtaggtcctggtcaggtcgaggggcgtggtcagcgtgttgaacgcctggttgaacgcatcctgcacacagctgaaaaacgtgggttgcccctgcaacagctgcctgatttcgctgttcagggtctggatcctctggaccaggcggctttcgcggcggttgtcgcgcgcgttcaacgtggtgatcatcggggtcgatagagcgttgccgtatcgcatgtcatttacctgcaaaataaggtgaatggccatggtgctgcgggtgcgggctgcgtgtgcgctatcccgttaatacgttgaagggtggcgtgtgcggtgtttgtgattgcggctgaatgtttgcgtgccgcagcggtccgaacctgggtacgcatcattcattgaggaacacccatgacatcaaaatccctgttcgcctccctgctggtcgccgcgagcctgtccaccgccagctttatcgtgcacgccggtgatacgccccaggagacggtaaagccttccagcatcaacacccgtgacctgaaggaaggtgaccgcgccccggatatcctgatgcgcaaggagtcggccgtcagcgactggaaaaagcgcggtctcaaacagcctgaagaagacagccaatgggcacgggtgggcgaccgtttcgtgctgctcaagaccactaacggcaccattctcgagatcacccccgtcaagaaatgaccttgcatttaggccctgctcctgagttaaggtagccggctataaaggccgcgttaccttcaaggaaagagagcaggatgcttgccacaataagaaactatccccgcaccgttaacctgttgctgtcctcgacgttgctgctcacgctggccaaggccatcacctttccgtacctggtgatttacctcacccgccacttcgccctcgacattacccaggtcggcctggtgatcggcagttcgttgatcgttggctcgctgctcagcgtgtatggcgggtttctggttgatcgtatccacagctaccggctgttgctggcccttaccttgctgttcctgctgggctttgtcggcatggtgctcgcggggagtatctggaccttctacacctgcctgatcctgatcaacctggctcatgccgtgatcgatatcgcggccaaagccggctttgccagcctgttgcccgaggacgcgcgcagcgaagtgttttccatcaagtacaccctgaccaatatcggttatgccgtcggcccggcgtttggcgcggtggtggccaaggtggaaatcagcttgccatttgtgctgtcggcgctgttggggctggggtttttcctgctgtattggcgttggggtgatcgtacgctggcgaccgtcgacaccacgcaaaagccagtgccgttcctcgccgttggccgggtgctgttgaaggatcgtcgccttgtctgcttcaccctcggcggtgtactgagtgccgtggtattcggtcagttcaccgcgtggctgtcgcaatacctggtgaccaccaccacggccgactacacctacaccgtggtcagcgccgtgctggtcaccaacgcggtgttggtgatcgccttgcagtacgtgatcggccggcgcatttcgcaccgctacctgggccaatggttgatcgccggcctgggcatgttcatgttggggctcatcggtttcgcgctgtccaccagcgtgctgtggtgggtgctggcaatggcggtgttcaccgtgggggagatcattgtgttcccggccgaatacatgtttatcgaccggatcgccccggaccacttgcgcggcatgtattacggggcgcagaacctgtccaacctgggcgcggcgctgggcccggtgctgtgcgggctggtgctggccagcctgccggcccattacatgttctggatgctgggcgcgtttatcgttgggggcggggtgttctacttcattggggcgtcgttgaaggcaagtcatccagcgtgagctggcccatggtgttgctttgcaattcgtagcgcagctcatccaccatcttttccacttcttgcggggtctgcaggcggttggtgctgatcccggtgacgaccaggtcgacccggccggtttcggcgtcgtagaccttgagggtcagggacgcatcccggcacagggtgaactcgcaggtcagcggcgacagaccttcttcgatgcagtttcgcagttgggcgagggtaaacatgcaggttccttcaggcatcaggttcgataccgagaaggttattgattagccctcgctgcaataaggcgaattcgcactaggtgtactagtgcatttgcactgtcatggcttgtttttgacccgcaattccccggcaaacagcccgcgttcacgggcccagacgatcgccgcgctgcggctgtgcacccccagtttggaatacaccgtggccacatggttacgcacggtgttgggcgccagtttcaggcgcgaggcgatctccttgtcggccagcccctcgcagatcaggcccagcacatcgcgctcgcgggcggtgaggtcggtgaaggccacgttcgactggctggcgctgttgacgctcttggcgttggccagtttttcgatgagggtctggctgaaccacgaggcgtcctgcatcacttcctcgatggccgccaccagttccagctccgagcgtttgcgttcggtgatgttcatcatcaccagcaggtagcagggcacgtcctggatgatgaccgtgtcggcggagaccacgcagtcgatcacctcgttgcctttcttgcgtaccttgaggtcctggccgtcgaggttgccggctttttccaggcgggcgaacagctgcgcgccagcctgagggctgtcgataaagtcgatgtcctcgatcgacttgccgatcaactcttcactggtataaccggtgatgctcatgaaggcttcgttgacgtccaccacctggtggttgctggcgttgcacaccagggtcggcaccggggtcaggcggaaggatttggcgaaacgttcctcactctggcgcagggcgatttccgctttgcgccgtggctccaggtccatgaaggaaaacagcatgcagtcctcttcgttcatgtccaatggctggccggcgacgatcaccagcttgctgccgccttcgggcagccgcagttcggcctgcatctgcgggacggtcgcgccttcgcccaggcgctggatggccaggtccttgcgttcggcctgttccagcacatccagttcatacacggatttgccgatgatctggtcgcggttgtagccggtcatctccaggaaaccctggttgaccttgatataacgcaagtcgctcaggcgacagatcacagccggcgccgggttggcgttgaaggttttttcgaagcgctgttcggcgctggcccactcggtggcgtcgctgaggatcagtaccagcaattccgcttcaccgcgggagtcagtgatcaccaggctgcgcaagcggtgcacccaggtcttttcctcatcggcaatgggggtgacttccaccaccacatcgctgaactcatcgcccgcggcggccctggccagcgggtagttgtccgcctgcaccgggtggttgttgcgatagcgcaggacaaagcgctcggcatattgctgcccgttggcccccagccccatcacgtcatgcacgccgtgcatggtcagtgcggcctcattggcccacaggatggtttgatcgacctcggccaggatcacgccgtcggatagcccggagatgatctgctgcaattggcggcggttggtttccttggcaagcacatcctgggtcatgggttctcctgggggtcggcatatgggagtacgacacctggggctcaggatagtgcggatgcattactggggcactggcattgaaccggctgggatgagccaccactcggcatcccgcgcagggggcgcgtagaatgccggccttttacgcatatctcgcaaaggtgccccttgagcgcaggcaaagccgtcggactgttgttactcacctccctgttggcggcgtgcggcacctcgccgccacgcacgccgaatgacctgtgcggcatcttccgcgaaaaggacgactggtacgacgccgccaaagtcacgcaaaaacgctggggcgtgccgatccaggtgccgttcgccatcatgtatcaggagtccggcttccaccaggacgccctggccccgcgcaaatacctgctgtggatcatcccctggggccgcgtctccaccgccgccggctacgcccaggccaaggacgaagtgtggaacgactaccgcaagagcaccggccgcagcggcgccagtcgccaggacttcgacgatgccatcgactttgtcggctggtacatggacaagacctacaccgtcaacggcgtgtacaaatacgacgcctacggccagtacctgaactaccacgaaggctggggcggctatcgtcagcgcacctacgccgccaaggcctggctgccgccggtggccagcaaggtacaggcgcggtcgcagctgtatgcggcgcaatatgcgcggtgcaaggatgatttggggcgggggttttggagtcggttctggcggtggctataaggaccacagtggtagtgttgggtgtgtctccttctctcagcgtgggagtgccgggtgctgggtgtagccaagcatctgatcatagatatcagcgcgccgatccctttgcaggtcattgagattgttccagatcggtgcgctgcgcgcgctgctgaggtcgatatcggcaaacagaatctcctggcggttcgccgacgccaccttgccgatgggccaaccattggtcccggcaatcaatgagcacccgagataacgggcatcacgctcttcaccaattcgactggctgctgcgataaacacgttattgacgtgcgctgcggtcatcgtcaggtaagacgccatgcacttgccggcctcatcaaataacgggggaggggtccatacccagttgttcaggctacaaatgatatcggcgccttgctggctgagaatgcgcggtacctcgggaaaccagatgtcccagcagatcagcatgccgatacgtccaatgggagtatcaaagacagggaaacctgtgttcccaggggtgaaccatagtttttccaagttccagaggtgcgctttgcggtacttgccgataaagccgtccgggcctatcaggacgctggtgttgaacaattgcatgccgtctagttcgctaacgcccgcagccagatacacacgatgccgggaagcaaattcgatccatacctgcacgcttcttccgttcggaacaatttcggcatggtcaaaggcatcttggcgattggcgaagaagtaaccgcagtttgaaagttctggaagcacgatcagtgtggcgccgccgttggccgcttcagttgcgagcgcaaggctgtgctgcaggttagcggtgcggtgctgcgttcctacctggggatcaaactgcacgacagaaacgcggacagggctgatagctgggttcattgcaggggactcttatgggggactgctctacataagaggtgatagggcggcaaggtgtaaatcaggtgcttccgtttaggttgtcagttggcgcctgccaatctgaagcgcttagttacggcaagaagcaaggcttcttgccgtaactcattcagctcggctgcatacactccagcgaccgatccaccatcacactggccatgtccaccagatgcatgaccgacagcaccaacgtgcgtgaagtcccttccagttgatccccggccgtttgcgccgcaacggcggcacaacgcaacacgctactggcgtgggccagggcgtcttcgaagctgaggtctggggtggtggtgaagaattgcagttctgaagcgggtggcgcggggacaggtttgtccatgggttcaactcctaatctaagttggaatgtcaccaccatcgctaccaaacgactttaagggtggtgaccgtacgcagattggtagaccggtgattaggacccggtgcacccgaaggtgccctgcgcacggccaccataacgcagggccgaaaaaaagcgccttgcataagggggcgcttagcgcctaatcactcgtggtctaccaaaccccgagtcactgaattggcagtgaccgacgaagactagccacgtgatttgagcggcgcaagcggttgggattctctcggaaacgtcctgcgagttaaagggaaatgtcactgatttgaggtgtttcatctctccaatattccttgtggcgccataagatcaaggcacaaaaactgacattagttctctggcgcaaaggtttcgcacatcgtcatcatcacggcacgcaagcttgcttgaggggcggcgggcttttttcattggtgtgtcatgtgtgtacaaaaaacgcattgccatttagcggtgtgtaatatacacacctaagggtgggcgatgagaagtcgagaggtgattgacctgttggttgcagatggttgggttgaggtggcggtgaaggggagtcatcaccagttcaaacaccctgtgaagcgggggagagtaaccgtccctcatcccaaggcggagattgccaagggcactctacacagtattttcaagtcagcagggctcaagcaatgactctgctggagcgttggacgagcgccgaagggctcgtccagaggaggatcaatgaaattcccagtggtagtgcataaagacgctgactcggattacagcgtgaccgttcctgatgtgccggggtgtttctcggcgggtggatctttctccgaagcattggataatgttcgtgaagcattggctttgcaccttgaaggcctggttgccgatcaagaacagcttcctcaggcgcaggaggttgatgctcatataggtaatccggatttcgcaggtggtgtctgggcgatcattgactttgatctaacgccctatctgggcaagtcagtgcggtttaatgcctctttgccggaacatctgttgcaacgcattgatgagcgtgtgcagaaggaccatcgctatgcatcgcggtcagggttcctggcgactgctgcattgcgcgagctttcagcgtaaaccaactcaagcaaacactatctatccaacggattccccatgagccccgaagaactccaaatcaccgacatccgccccggcaccggcaaagccgttgtcaagggcgcgctgatcaccacccaatacacaggcaccctggaggacggcacggtgttcgattcgtcctgggagcgcggcaagccgttccagtgtgtgatcggcaccggacgggtgatcaagggctgggacttgggcttgatgggcatgcaggtcggcggtgtgcggaccttgtacgtgccggcgcatctagcctatggcgagcggtcgatgggcgcgcatatcaagcccaacagtaacctgcgttttgagattgagttgctggaagtactgacgcgggatgattgagacctccaagacaaacgcttcctgaaccctccctgaagaatcctcttattcaccatacggaaactttcctacggtttactctcccatcatcggggcgtaagcttcgcgcgttttcatcaatagcggagaccctcagtgggtacttgttcgagtgacagtagtcggccggtttcggtaaccggcacaggcttggcaaggtaacgcgcatttttccgatgccgttgtctcgccactaaaagcgagaagcggcatcccggcagcggccagtcctggctcctgcccgaatccctctcatcgacgctgaccagcgcccggcttacctcgggatgctacggacgcgcctgccctttgcggcaggcgggccagggtggctgtgcctgtaaaaagggtgcggcgcacacggcggtacctgcacgacggttttttcctcgcgcaggagtaacaccatgaacctcactctgctcaaagagttcttcgccggcttcctgcggacccggcacatcgcccggcatttccgccgcctggcgatgctcgaaaccgtgaccgacgccagcgtcagccgcgaagtgccgccgaccctggcgcaaaccctggtggtctcggccaacagcagtgccgtgcaattgctcggcaccctgggcagccacgccgaggggttgaacactcaggaggccgacgccctgcgcgtgcaatacggcctcaacgaagtcgagcatgagcagccgctgccttggtgggtgcacctgtggcactgctacaaaaacccgttcaacctgctgctgaccctgctggcggtgatctcctggctgaccgaagacatgaaggccgccaccgtgattttctccatggtggtgctgtcgacgctgctgcgcttctggcaggaagccaagtccaacaaggctgccgatgcgctcaaggcgatggtgagcaacaccgccacggtgctgcgccgtgatgaagccaagcgcattgaactgccgatcaagcaattggtgccgggcgacctgattgtgctgtccgccggtgacatgatccccgccgattgccgtgtgctcagtgccaaggacctgttcgtcagccaggcggcgatgaccggcgaatcgatgccggtggaaaagtttgcccaccagcacgacgcccacacccgcaacccgctggacctggaaaacatcctgttcatgggcaccaacgtggtgtccggcgcggcgacggcagtgatcctgaccactggcaacagcacctatttcggcgcgctggcccagcgtgtgaccgccaccgaccgtgcaaccacttcgttccagcacggcgtcaacaaggtcagctggttgctcatccgcttcatgttcgtgatggcgccgctggtactgttcatcaacggcttcaccaagggtgactggaccgaagcgctgctgttcgcgctgtcgattgccgtgggcctgaccccggaaatgctgccgatgatcgtgacctccaccctggccaaaggcgcggtgttcctgtcgcgaaaaaaagtcatcgtcaagcgcctggacgcgatccagaacttcggcgccatggacgtgctgtgcaccgacaagaccggcaccctgacccaggacaagatcttcctggcacgccacgtggatgtgtggggcgaagagtccgatgacgtgctggaaatggcctacctcaacagctactaccagaccggcctgaaaaacctgctggatgtggcggtgctggagcacgtggaggtgcatcgcgagctgaaagtcggcactgcattccagaaaattgatgagatcccgttcgacttcaaccgtcgccgcatgtcggtggtggtcgccgaacagggccaaccgcacctgctgatctgcaagggcgccgtggaagaaattctctcggtgtgcaacaacgtgcgccatggcgagaccaacgaggcgctgaccgaggaactgctgacacgcatccggcaggtgaccgctgcgttcaacgaagaaggcctgcgcgtagtcgccgtggccgcacagccgatggcaccggggcgcgacacctacagcctggcggatgaaaagaacctcaccctgatcggctacgttgccttcctcgacccaccgaaggaaagcaccgcgcccgcgctcaaggcgctcaaggcccacggcgttgccgtgaaggtgctgacgggtgacaacgaattggtcaccgccaagatctgccgcgaagtgggcctggagcaacaaggcctgctgatgggcaacgacatcgaggacatgactgacgccgaactggccaaggccgtggaaaccaccaatgtgttcgccaagctgacgccaagccacaaggagcgcatcgtgcgcctgctcaaggccaacgggcatgtggtgggcttcatgggtgatggaatcaacgatgcgccggcactgcgtaccgccgatatcggtatttccgtggacagtgcggtggacatcgccaaggaagcggccgatatcattttgttggaaaagagcctgatgatcctggaggagggcgtgctggaaggccggcgcaccttcgccaacatgctcaagtacatcaagatgaccgccagttccaacttcggcaatgtgttttcggtgctggtggccagtgcgttcatcccgttcctgccgatgctgccgatgcacctgctggtgcagaacctgctgtatgacatttcgcagattgcgatcccgttcgataacgtcgatgacgagatgctgagcaaaccacaacgctggcaaccgggagatgtcggccgtttcatgctgtttttcgggccgatcagctcgatctttgacatcaccacgttcgcactcatgtggtatgtcttcgatgccaacacccccgaccaccagaccctgttccagtccggctggttcgtggtggggctgctgacccagacgctgatcgtgcacatgatccgcaccccgaagatcccgttcctgcaaagccgtgcggcgatgccgttgatggtgatgacgggcgtgatcatggcggtggggattttcctgccgatggggccactggcgcactacttcaaactgcaggcgctgccgtcgctgtatttcgtgttcctgccggtgatcctgctggcgtacatggcgctgactcaggcggtgaaggggtactacatccgtaagtttggctggcaatgaacagggaagatttcctatgcaagcaatcaacaacatcaacctcgaatccctggtcgacaccctggtcagcctcaccgcagccttcatcctgggtggcctgatcggttttgagcgtcagtaccgccagcgcacggcaggcctacgcactaacgtgctggtggcggtgggcgcggcgattttcgtcgacatggccagccgcctggggggcgcggaaggcgcggtgcgggtagtggcctatgtggtgtcgggcatcggctttctcggcgccggcgtgatcatgcgcgaagaaggcaatgtgcgcgggctcaacacggctgccaccctctgggcatcggcggcggtgggtgcttgcgcgggcgccgacctggtcctcgaagcgctgctgggcacgctgttcatactggcggccaacaccttgctgcggccgatcgtcaataacatcaaccgtcagccactggacgtggtgtcggcggaagttaccaacatcctgtatgtgattgcccggcgtactcagcagaaggccgtactggccttgctggaagccgagcttgcacgctgtaactatcccgccagcgacgttgacgtgcggccttttggcacggaagaagtggaaatcgaagccaccctggccgtgacctcggtagacggtgatgagctggacgccctggtggcgcgaatttcgatgtcgaccctggtggtgcaggcgttctggagccccagtaccaccgagtagtcccccgctgtcaggcattgccctgcgtaaagctggctatgctgtgacaaggaaaagtcctacaagcattagagactatcccttcatttgagcggacacgccgttgttaaggttgcgcgcttgcgtctgcccaggaagcagtccgcagctctacgtgtttagcgtgttctatcaaaaggaggggtctgtactgcctgaagtgtcatgcagagtaatcagtaccgtttgtcggaactgttacttttcacaggtagataggtcccgtgtgatatgtaagcgtactgatccctcggggagtcttatgagcagcaaagctttgattgtggacgatcacccttttatccgcgccaccgtgaagtacctgttgaagcaggagggcttcgataccatctttgaagcgggcaacggcgccgacgccatgcagattgctcgggaggagcacccggatctggttatcctcgatctggcaatgccaaaacttggcgggctggaggtgatcagccggataaaggcgctgggactgccctgcaagatcctggtactgacctcgtatctggcggtgtttttctccacgcgctgcatgcgcgctggggccatgggtttcgttgccaagaccggtgagctcgatgaactgcaaaaggcaatcagggcaatccgctctggttacagttgcttccccagcctgcccaccagttcagtgcgccgcgacgatttgcagacctccgaacaggagttggtggaggcgctgtccgaccgcgaattgacggtactgcaaaaactggcgctgggcctgagcaacaaggaaatcgccgaggatatgctgttgagccacaagaccatcagcacctataagacccgcctcaaagagaagttgcgcatgtcgtcggtggtgcacctgtccaagtttgcccagcgcaatcatctgatctgatctgaaatgaccacctcccggctggtgagattcacggccatcctgctgatggggctgttgccctgtgcagcgatggccctggatgagccacatgccctgcgactgctcggccattccaccctcgaacacccaacagtagcgctggatgacagcgactggcggtggttgcgcgatcgccgcagtttggtgatgggggtgtcggcacccgactacgcaccgttcgacctgagcaacgacaacgattttgaaggcatcacggctgactacacgtggctgatcagcctgatcttgaatgtacctatcgaggttcggcgctacgacacccgtgatgaagtgatcgaggcgctcaagctgggcgaggtggatctggtagggtcagccaatggttatgaggcggccgacaaggcgttggtactgtcgcgttcctacgccaatgatcaaccggtgctggtgacccgcacgggtgaaagccattccttgagcgtcgacctggccggcaagcgcgtggcgatgctctatcactatatgcaacccgacgctgtgcaggccttttaccccaaggcgcaactgttgttgtacggttcgacccatcaggccatcggtgccgtggccttcggccaggcggacgtctacttgggcgatgccatcagcgctcgctatctgatcaacaagaaccaccttaataacgtgcgcatggcagacttttccgccctcgaggtcaacccgttcgggttcgcgtttacggccgaaaaccagcgcctgttgacgatcgtcaatgccgcgctggctgctatcccggccagccagcagatggaaatcctgcgtcgttggagtgccggcggcagtgggttcctggaggctgaccgattgcgcttgagtgacagcgagcagcgttggctggagaagcatccccgggtgagagtggcagtactggataagttcgtgccgctgtcatttttcaatgaacaagggcagttcgtggggttgagtgacgaggtattgtcgcggatcagcttacgcacgggcttgaagttcgaagtggtgcagggcagttcgctgcctaggcaagtcgacgaggtcagcgccggccagatggacatgttggcggtgatcacgcccagtgtcgagcgttccgaaaaggtgcgctttacccgaccctacctgtccaatccctatgtgctggtggtgcgctccggcgacgagcgtctgctgaccctggaggacatgccaggcaaacgcctggcgttcattggtggcaacagcctcgctgcgcagatcgcccgggactatccagggatcgagtttgtcgacgtcgagaacccggagcaggccatggaatgggtggccaagggcagtgccgacgcgacagtcatttcgttgatcagcgcacgctacatgatcacgcgcaactatcgcgatcggctgcgtatcaccagcactgtgggtacggaaccggcgcggattgccttcggcgtcaaccgcagccagttggagttgtattcgatccttgagaaggcgttgttgagtattacgcctgaagaaatggacgaactgaccaaccattggcgcagtgaaatcattattgaagacagctactgggtcagtcatcgcaacgtgattatccaagggtttggcctggccgcgctgttgttgctggtcaccctgggctgggtgttttacctgcgcaacctgattcacaagcgtgcccaggccgagcgcgccctgagcgaccagatgcgctttatgagcgtgctgatcgacggcacgcctcacccgatttatgtgcgcgatcgccaggggcgtttgatggcgtgcaacaacgcgtacctcgacgtgttcggcttcaagttggaggacgtgatcggcaagactgttgtggagaccgatacgggtaacccgccccaggcccagtcgttccatgccgactatctggacttgatggagcgcggtgagccgcagattcacgaccgggtgctgaaggtgcccggtggcggtgtgctgacgatttaccagtggatgctgccgtaccgtgatagcaacggcaacgtggtaggcatgattgccggctgggtggacgtgagtgagcgccagcgcctgttgggccagttgcaggaggccaaggacgatgcggatgccgccaaccgtgccaagactacgttcctggcgacgatgagtcatgagatccgaacgccgatgaacgcggtgatcggcatgattgaactggcgcagaaaaacgccgaacaggggcatgttgatcgagatgcgctggaagtggcatcgatggcttcgcgcagtttgctggagctgatcggcgatatcctggacattgcgcgaatcgaaaccggccacctgtccctgaccctggagccggccaacctgcacgagctgttggcctctgtggcgcgggtgttcgaagggctggcgcgggataaagggctgtcgctgcacgtagagctcgacccgatcatcgatcgactggtactgatcgatccattgcgcttcaagcaagtggtgtcgaacctgttaggcaatgcgatcaaatttactcactccggccagatacgcctgggtgcccaagccgcatcggtgttggccggtgaacatttgaacctgcggctttgcgtggaagatacggggattggcatcagcgccgaagatcagcagcgtttgttcaacccgttcatccagggcagcaataacgagcagtcggcgcgcagtggttccggcctggggttggtgatcagccgtaacctgtgcgagatgatgggcggccaactgcacctgagcagcgtgctgggcaaggggacgcgggtggatgtgacgctggcactggcgttgaccacggcagcagcggtttcctcatctgtcccctgtgcgcctatcgcgcaggcattgaaacttctggtggtcgatgactatccggccaaccgcttgcttctggctcgacagttgaccttcctggggcatcagatcgttacggccgaagatggcgccgaaggctttgcgttgtggcaggccgggcattttgacggggtgatcaccgacagcaatatgcccgtgatggacggctacacgttggcgcgtgatattcgtgcgcaagaacgtcagcgcggcctggtgccctgccttctgctggggttcaccgccaacgcccagccgaaggaggttgagcgctgccggctggccggcatggacggttgcctgttcaagcccactgggcttgacgatctgcgtgcggccttggcgtcgcgcacggccagcgctgcaagggatgaagccaaagcgcaatttgatttgagctcgctggtgatgctgaccggcgatgacactgccgtgctcaacgagttgctggcacccttgctcacgagtcttgcagaggacctccgagtgctgtcgaccctgcgggacggggccgatttcggcaagctgcatgacctggcccatcgtgtcaaaggcggcgcgcgcatggtcaaggcccaggcgctgatcgcctgctgcgacgctttggaggatgtgtgcgaaaggcgcgatcgcgatgcagtggctgctgcggttgaggcgttggacgcggctatcactggcttgcatcacagcctaggtcagtactgcaagcagccttgaccgaggcaggtatccgttcggcgaatttgggagaactcctacatggaacgggaacaagcctgattttgtcgtcggcatatgtctggagaatgggcctcgctcactgacgagcactgcctgcccaggggttcgccatgccaaacaaagcactgaccatcctgattgccgatgagcaacacctgcaacgcctgtacatcgaaaaaatgctcaaccagttgggttatcaccggatcgtaccggtgcagaccttcgaagaggtccaactgctcaccgcgattccggcacagcctttcgatgtgctgatcatcaacgcggggctggcgatccacacctgcggtcctcaaccccaggtgcatcatgtgctggtctatgaccatctggatctgggcctgtctgccgacgcaacgccggcagtgctggtgcgcctgcccggcgtgccggacaacgtcaacctcgaacacttcatggacatcatcgacccgcctgcggccgccacgggcctgcgcgtactgccgtggctgcgggagttatcccgcacgcctgtggctggggtttagtcccactggggggcgatacccttggggctggtgaggcgatggccgcgttccagcccggccatctgcgccatgtccgcagggctcaaggtcagttgctgggccttgaggttgctttccaggttggcgcgtttggtcgatgacgggatgactgcgtaacccagttgcatcgcccaggccagtgtcacttgcgccggggtcgcctgatggcgctcggcgatttgctggatcaccgggtccttgagcacttcgccgtaggccagggtcatgtaggacgtgatctggataccgttggcggtggcaaaatccacgaccttgcggttttgcaggtaggggtgcaactcgatctggttggtggcgatattctccgcacctaccgccgcaatcgcttgtttcatcaggtcgacggtgaagttggaaatgccgatccggcgggtcaggcccaggcgcttggcctccagcaactggcccatgaattcggcgacaggcacctggtcctccggcgagggccagtggatcagggtgaggtccaggtaatcggttttcagtttgcgcaggctctcgcgcaggctcggaatcaactggccttcggcgaagttggcgatccagatcttgctggtgatgaacagctcatcgcgcggtatgccgctgtcggcaatggcctggccgacatcggcttcgttctcatagatttgcgcagtgtcgatgacgcggtagcccagctcgaggccagtgctgacggaatcgatcaccacctggccttgcagacggaaggtgccgaggccaaaggccggaacgttttgcgtagcgatagacatcagtgactcctgaagagggcttgaacaatggagtcgagtatccgcttgtcgttccttcggaaaaaccgtcgaatgcgaaaaggactctttaccgcagatcacgaatctactggggctggatgggtgtcgccgggttatcgcgactgatgtagagtcgtgctgccaactcaacccaaggaaatcgccgcatgacccaggaatcccgtttctcccggatggacccggaagtgcgcaaggccaatctggtccaggccacgctcacctgtctcaagcgtgatggtttccagggcgcgtcgattcgcaagatcagtgccgaggccggggtgtcggtggggctgatcagccatcactattcgggcaaggacgaactggtggccgaggcctaccgcaccatcaccgaccaggtcatgagcctgttgcgcgcgaccatggccaaggcgccgccgaaccctcgggagcgcctgtcggcgttgttccggggctcgttttctgccgaattgctcgacccgcacctgctggacgcgtggctggtgttctggggagcggtaaagaccgcaccggcgatcaacctggcccacgaacactcctatggcgagtaccgcgccatcatgcgctcggccctgaccgacatggcctgggaggagggctggaagcacttcgacgccgacctcgccgccatcggcctgagcgcattgctcgatgggttgtggctggagtcggggctcaaccccggcacgtttacgcccgaacagggcatccaaatctgcgaagcctgggtggatggcctgcaggctggcggtcgccagcgttatcagctcaaaccctgagcctgctccagccgcctgagcgcaaggttcaggcaggcggttttcccttctgaaaaaatttgcagtttgctgattgccttcttactgaacacttgtttagtatcgcctcatgtcgcacccctcaggccaaataaaacaattcgaggaagccatgaccgccgattcgcccgtgctcactcatgtagcagctggtgttgcctggatcaccctcaaccgtggcccgcagcgcaatgccctggacatccccaccctcaagcacctgcacgccttgctcgatgcgttcaacactgacgccgctgtacgcgtggtggtattgaccggtaatggacgaagcttctgcgccggtgccgacctggccgagtgggcggatgccgaagctcgcggcgccctcgaaacctacggctggaccgaaaccgcccatgcgctgatgacgcgcctgcacaccctcgataaacccacgattgccgcgatcaacggcaccgccgtcggcgcgggcatggacctgaccttatgctgcgacctgcgcatagcggcccaatcggcgcgcttcaaggccggttacaccagcatggcctactcgccggacgcgggcgccagttggcacttgccgcgcctgattggcagcgaacaggccaagcgcctgctgttcctcgacgagctgtggagtgccgagcgcgccttggcaactggcctggtcggcgaagtcgttgccgatgatcagctcaatgcccacaccaccgaactcgccgcacgcctggccaacggcccgacgttcgccttcgcccagaccaagacgctgatccgtgaaggcgccgggcgcagcctgcccgaacagttgcaggccgaacgggcggccggcctgttgtgcgggcgcagtgccgatggcgccgaggccttgcgcgcgtccatggaaaaacgcctgccgactttttgcggccaataaccccacttcctccgagcaggtagcgccatgcatttccaactcagccaagagcaagacatgttggtggacgcggtacgcagttttgttgccaaggaattgttgccccatgaggcggtggtggaccgtgccgatgaggtctcgcccgagctggctgcgcagatccgtgacaaggccatcgctgccggcttctatgcgttcaacatgccggaggaggtgggtggcggtggcctggactacctgtcccaggccctgatcgagcgggagttgtccaaggtctcgtgggcgctgcatgtgtttgtcgcgcggccgtccaagattcttatggcgtgcacgggagcacagattggcgactacctgctgccgtgtgtgcagggcaagaaaatcgactgtttcgcgctgaccgaacccggcgcgggttccgacgccaatgccatcaagacccgcgctgtgcgccggggtgatgacttcttgatcaacggcagcaagcacttcatcagccacgccgggcacgctgatttcgccatcgtgtttgcggtcaccgatacctacgaacacaacggccggcagcgcaacgccgtgacgtcgttcctggtggatcgtggcacgcccggcatgaccatccgtcgcggccccaagtgcgtgagcaaccggggttatcacacctatgaaatgttcttcgacgactgccgcgtccccgcttccaaggtactgggcgaagtgggcaagggctgggacgtggccaacgcctggctcaccgccggccgtgtgatggtggccgccaactgcgtcggccaggcccaacgtgcgttggatgtgtcgctgcaatgggcggcggaccgcaagcagttcggccagcccatcggcacctatcaaggcgtgagcttcaagctggcggacatggccacacagatccgcgcagcagaactgctgaccctgcacaccgcctggaagatggaccagggcagcatgaccgatggcgaggccgggatggccaagctgtttgccagtgaaacgctgggcaaggtcgccgacgaggcggtgcagattttcggcggcatgggcttgatggatgaggggccggttgagcgcatctggcgtaacgcgcggatcgagcggatctgggaaggcacctcggaaatccagcgccatatcatcgcccgtgaactgttgcggccactgttgcgttgatggcgcggagaacgcttatgtcccaggctaatcgcgacaacctcaagcgcctgttggcgccccggcatctggcttttgtcggcggccgcagcatggcccgtgtgctcaagcgttgcgccgagggtggttttaccgggccgatgtggctggtcaacccgcagcatgacagcctcgatggcatcccctgcgtacgtcgcgtggcggatttaccctgcgggccggacgcggtgttcatcgccaccaaccgcgaacttacactgacttgcgtcgccgaactcggggctatcggtaccggcggcgccatttgctacgcctcagggtttgccgagaccggggccgatggcgccgttctgcaacagcagttactagacgcagcgggtgagatggccttgcttggccccaactgctacggcctgctggactacctgcacaacgctgcgctgtggccggtggcccatggcggcaagacggtggagaagggcgtggcagtgctgacccagagcggcaacttcgcctacaacctgtcgatgagcgaccgttcactgccggtggcctacatggcatcagtgggtaaccaggcgcaattgggtattgccgaactgatggaggtgctgctcgatgaaccgcgcgtcaccgccatcggcctgcacctggaaggcttgaaaaatgtgccggggtttgcccgtgcggcccacaaggccctggaaaaaggcattccgatcatcgcgctgaaaaccggcgtgtcgcagatcggcgccgagctggccttgagtcacaccagttcgctgtccggctccgatgcgctgtacgacagcctgtttgcgcgcttgggcgtgatccgcgtgagcgggccggtgagttttgtcgaaaccctcaaagcggcggcatgcggcaaccttcctgcgggtaaccgcctgatcgcgttggcctgttccggtggcgatgcggggctgattgccgactatgccgaacgcaatcatctggccttgccccagcttgatgaaagccagcgccgtgaactggcacaggtactgcccagttacgccaacctggtcaacccgttggatttcaccacggccatctggggcaatcgcgaggccctcgacgccatgctcgacactaccctgcgcaccgatgccgatgccgccctgttggtgttggattacccggccgagtccacgggtgagcgcaaggagtgcgacctgctgctggagttgttctgcaacgcgctgggccggcatggcaagaccgggtttgtcacctcggcctttcccgaattgctgccggcccatgcccgcgagcgcctgcatgcccatggcatcgcggcgctgcaaggtgtggaagacgcgctggcggcgtgggggcggattgccggctaccagagcaatcgccgtgtgctgctggagcgcggcgaatcaatcctcgaaccgctatgcccgaaggctctgcaaggcagcggtgaggccctcgacgagtgggcttccaaacaagccttgcgcgcgttcggcctgaccacgccaatcgggatattgagtaccccggcccgggcgatcagcgatgcccaagtgcttggttatcccctggtgctcaaggcggtcagcgcgcagttgccgcataaaaccgaagccggtgcggtggtgctgaacctgaaaaatggcatggcgctgagcactgcacttgagcagatgcgcgagcacatcggcgcttatgcgccccatgtcgtgtttgatcaactgctgctggaggccatggctgcgccgccgttggcagagttgatcgtgggcatcaaacgcgaaaacgagtttggcctggcactggtcatcggtgccggcggcatcctggtggagttgctcaaggacagccgcagcctgctgttgcccaccaccgacagtgccatccgcaatgccttgctcagcctgcgcagcgccccgttgctgcaaggttttcgcggccgtgacggggcggatatgcaggcattggtcgcggccattcgggcagtggccgactacgcctgcgccaacgccgggcagttgctggagctggatgtgaacccattgttagtcagtgcccagggcgctatggcggtcgacgcattgatacgtctaggagatgagcatgcacgataacgcgatgaccggcggccaggccctggtgcggttgctggccaattatggggtggacaccgtgttcggcattcccggtgtgcatacactggagctgtatcgcggcctgcccggcagcggtatccgccatgtgctcacgcgccacgagcaaggcgccggtttcatggccgacgggtatgcgagggtcagcggcaagccgggggtgtgctttgtgatcactgggcccggtgtgaccaatgccgccaccgcgatcggccaggcgtatgccgactcgattccgctgctggtgatctccagcgtcaacagcaccgccagccttggcaagggctggggcagcctgcacgaaacccaggaccagcgggcgatcaccgcaccgatcaccgcattttcggctgtcgcactcagtgccgaggatctgcctgaactgatcgctcgcgcctacgcagtgttcgacagcgagcgaccccgcccggtgcacatctcggtgccgctggacgtgttggcggcgccgatcaagcgcgactggagcgatgaagtggtgcgccgcgccggtcgcggcgtgccgtctgcgcaagccttggatcatgcggtggccaagctcgcagcagcccagcggcccatgattatcgccgggggcggtgcactggcggcaggcgaggcgttgcagcgtttgagcacgcagttggctgcgccgtttttcaccagcgtggccggcaaaggcttgctgccgctcgatcatccgttgaatgccggtgccaccctgtgcgtcgagcccggctggcaactgatcagcgaggccgatgtggtgctggcggtgggcacggaaatggctgacaccgactattggcgcgagcgcctgcccctcaacgccgagctgctgcgggtggatatcgacccgcgtaaattcaatgatttctacccctgtgccgtggcgctgcgcggcgatgccaaccagacggtgctggcgttgctggagcgtttgccaaccgtgtcagctgacgcggaaatggcagccaagcgtgtggcggcattgctccaggccgttgagcggggacacggcccgttgcagtccacccaccaagcgattctcgagcgcatcgaagccgaactgcccgccaatgcgttcatcagcagcgacatgacccaactggcctacaccggcaactacacctaccgcagccgcgcaccgcgcagttggctgcaccccaccggctacggcaccttgggttacggcctgccggcgggcatcggtgccaagttcggcgcaccgcaacggccgggtctggtgctggttggcgacggtgggtttctctacaccgcccaggaactggccaccgccgtggaggaattggacagcccgctggtggtgctgttgtggaacaacgacgcacttggccagatccgcgatgacatgctcgacctcgacatcgaacccatcggcgtgctgccgcgcaacccggacttcgcgctgttcgcccaggcgttcggctgcacagtgaaccagccccacaacttggatgagttgcagacggacctgcgcaacgctttccaacgcaatggcgtgaccctgatcgagctgaaacaggcctgcgctgtttgaggaactcccatgaaggttttgattgttcacgcccatcccgaaccgcagtcgttcacggcggccctacgtgatcaagcggtcgccacgctgcaaggccaggggcacagcgtcaaggtgagcgatttgtacgccatgcaatggaacccggtggcgtcggcggcggatttttcgacgcgggaaaaccccgattacctggtgtatgccctggagcaacgcctgggggtgaagaaacagtcgatagcggcggatatccaggcagagttggacaagttgctgtgggccgatctgttggtgctcaactttccgattttctggttctcggcgccggccatactcaagggttggattgaccgcgtgctggtgtcgggcgtgtgttacggcggcaagcgcttttacgatcagggtgggctggccggtaagcgggcgctggtcaccgtgaccctgggcgggcgcgcgcatatgttcggcgagggcgcgattcatgggccgctggaggacatgttgcgaccgatcctgcgcggcacgctggcgtatgtgggctatgaggtactggcgccgtttgtggcgtggcatgtgccgtatatcagtgccgaggcacggcaggatttcctggtggagtatgagcggcggctgcaagggctggcggatgaacagcccttggtgtttccgaaacttgagcaatttgatgaggcgctgtacccgctgtagcagcgccctggtcggtcagcctcgtgcgcgcaaacgctcggcggcgctacgcaacaactgctcggtgccgtcccagcccaggcagccatcggtcaccgacacgccgtacttcatcgacgcgctcaacggctggcagccttcgaacaagtggctttcgagcatcatgccgatcagcgacgtgtcgccctgcaagcgctgctccagcacgtcgttgaataccgccggctgacgcagtgggtccttgccgctgttggcatggctgcaatcgaccatgatccgcggcgccaccttggacttggccaggtcgtgtttcacctgcgccacgctttgcgcatcgtagttcggcccacggtgaccgccacgcagtaccaggtgggtgtcggggttgcccggggtctggatgatcgccgggtggccctggctgtcgacgccgaagtgacggtgcgggtgggacgccgagcgcatcgcgtcgcaggcaatcgccacaccgccgtcggtgccgttcttgaaacctacgggcatgcccaggccgctggccatttcgcggtggatctgcgattcggtggtgcgcgcgccaatcgcgacccagctgagcaggtcatcgaagtagccggccgccatcggttgcagcagctcggtggcgaccggcaggcccaggcgcagcatttcgcgcatcagttcgcgggacaggttgaggccggcggccatgtcgtcgctaccgtccaggtgcgggtcgtaggccaggcctttccagccgatggtggtgcgcggtttttcgacgtaggcgcggatcaccagcagcatctggtcgctgacgtcgagtgcgagcttcctcaggttgcgggcgtattccatggccgactccgggtcgtggatcgagcacgggccgacgatcaccagcaaacgtgaatcctgaccattgaggatggcgcgcacggcgtggcgatgggcgtggacttgttcagtgaggaacgggctgagcggcagcttgagctttaaatcaagcgcgctgggcaagcgctgggtcagggcttcattggcgctggtcagggcagaaacgggcagggcggcggtggcagagttcatattcaaggcttcctgggcaagcggcgggctgttcccgcgcgcctggccctactggggtgttcgacaatgggccgtattggctgtgtgtgttggcttgccacccataggtgaccgatcggaggcggcaggctgtcccgagcggagctggctaaatcgccatgcggtggaagtgtcgtagcggtaataggtggcgtagttcatgtcgtgtgtcctttaagtgttcgtcaaaaatagtggggcctgaaaaacaaaacccccggtcggggagccgaccgggggtttggatttctctggtaggcgaccccttgagtagtgggcgccgatttcaggtatcaggcgcgccagtggctaaaccaatacccaaaataaaagctggccagtgcgctcgaacccttcacacgggtagccgataccgagcgcggggcgctggcagcagggcaaacctgaggggtggtgagttgcaacatggtgtgtctccaaatgatggggggagcttactagagggatgcaggaggattcaatcagtaatttctattgcgcggggggactgactgctatcgaccgagatatgcttgcaacaccttggatgattgcttggacgcgaccatgactgccctgacccttgctgctgctcaatctgtttccatcgcgggcgacgtgccggccaatatcgagcggcacttggcccttatgcacgcggcggccgaccatggcgtgcaagtgctggtgtttccggaactctcgttgaccggctatgaaccgtcgctggcggccgaattggcgattgttcccgaggacgcggtgctggcgccgctgcgcgaaatggcacgggaattgggcttgaccacagtggtcggcatgccgatccgcctggcaccaggggcaggtgtgctgatcgctgcgctggtgttgggggccgacggttctcttgcggtgcacaccaagcagcatctgcatcctggcgaagaactggcgtttgtcgcggggcagggtggtgcggcgctcgacactggcgatgaccgcattgcgctggcggtgtgcgcggatttctcccatggcagtcacccgcgccaggcggctgaggcgggcgccactgtctacgccgccagtgtgttgatcagcgaaggcggctatgcaacagacagcgcgttgctccggggctatgcggccgagcatggcctgttggtgttgatggccaaccatggcgggccatcgggtggctatgtgtgtgccggtcgcagcgccatttgggccaccgatggccgtttactggccgccgcgccgggcctgggtgaggcgttggtgatcgcccgccgcaagggtgctgcgtgggctggtcaagtggtagtgctgtaaatggggtttcacctgcgcgccgcgacggaccaggaattgccgttcgcccgaaccttgacctttgaggccatgagtcgctattacctgcaatacgacctggtgtggtccaacgatggctttgatgtcgcctgggcggaccgcgaaaactggctgatctgcaacgacgaggccgtgctgggttttatcagcctgagccgcgacagccgcgcactctacatccgtgagttgcatatgcttgcggcgtgtcgcaggcagggcgcgggcagttgggtattgcagcagatggcgctcaaggcccaggcgttggggttgctgcgtttgaccgtgttcaagaccaacccggcccgcaggctctatcagcgcatggggtttagcattgtcggtgaggaagactgcttctggcgcatggaacgtatttgcccatcaagctaaaccatgcgctcaatcctaataagcgcatactggttttcaggagacgacttcctgatcgttgttttggccatcagcctcagaaaggatgatcccttctttcatgcccaacaggaccgctaccttatgggcttctccacgccgtccctttttgcgccccgcgagtacttgataggtggttgccggatcaacgccatgttctcgggcgaacgcttgaactgactttccttgatgttccagccaagccttggcttgtgcggcagtgcggattccgggcatagttcaaaaccgttcaagtttgtttaacaaagagatgagtgtgtcacctcttggggtgtgccaaataggatcatacatccaaatgagtggaatcggttcgcgtttgaggcaagaaagggagcgacttgggctgtcgcaaaaagtgtttggtgaaattggaggcgttgaagccaacgcacaaggtaaatacgaaagtggagggcgggcgcctaaagcagactacttgtcccgtgtcgccgaaaaaggtgtggacgtgttgtacgtattgaccggtattgccacccccattcaactggataacctgacccagattgaagaaaaggtactgggagactaccgcgcgatgttcaaggaagaccaggctgcgatccgccgcttgacgtctaccctggccgaacattcagcttcgctgaatggaaaacccaagccgcagccccaggattcctgacctgccgcccaacaaatagagccgttcaccctagggtggacggcgtctgtgtgttcaaactctatatatatgacgcttgcagctaggtctgcgccttggttttttgctaaggtgttcagcaacctataagaccatatcgcgaggtgtctgcttgattagggtgctagtagtcgatgaccatgatctcgttcgtacaggcattacacgaatgctggctgacatcgatggcctgcaagtagtcggtcaggccgagtccggggaagagtccctgatcaaggcccgggagttgaaacccgatgtggtgttgatggacgtcaagatgcccggtatcggcggtcttggcgccacgaccaagttgttgcgcagccacccggacatcaaggtcgtggtggtgaccgtgtgtgaagaagacccgtttccgacgcgcctgttgcaagccggtgcggccggttacctgaccaagggcgcaggcctcgccgagatggtgcaagccattcgcctggtgtttgccgggcagcgttacatcagcccgcagatcgcccagcaactggccattaaatccttccagcccaccagcgactcgccgttcgatgcgctgtcggagcgggagatccagatcgccttgatgatcgtcggctgccagaaggtgcagacgatctccgacaagctgtgcctgtcgcccaagaccgtcaacacctaccgttatcgcattttcgagaagctcgccatcagcagtgatgttgaattgaccctgctcgcggtgcgccacggcatggtggacgccagcgcctgacatgaccacaccgtttgatcccagtgccttcctctcgacctgcagtggccgccccggcgtgtaccgcatgttcgacagcgaggcgcgcctgctgtatgtcggcaaagccaagaacctgaagaaccgcctggcgagctactttcgcaagagcggtctcgcgccgaaaaccgccgcgctggtggcgcgcatcgcccaggtcgaaaccaccatcaccgccaatgaaaccgaagcactgctgcttgagcagacgctgatcaaggaatggcggccgccttacaacatcctgctgcgcgatgataagtcctacccctacgtgtttttatccgacggcaacttcccacgcctgagcattcaccgcggtgcgaagaagcagaagggcaagtatttcgggccctatcccagcgccggcgcgatccgcgaaagcctgagcctgctgcaaaagaccttttttgtgcgccagtgcgaagacagcttctacaagaaccgcacccggccgtgcctgcaataccagatcaagcgctgcaaggcgccctgcgtgggcctggtggagccggccgagtatgccgaggatgtgcgccactcggtgatgttcctcgaagggcgcagcaatgccctcaccgacgaactttccggcgccatggagcaggccgccagtaccctggactttgaaaaggccgccgaactgcgcgaccagatttccctgctgcgccgcgtgcaggaccagcagagcatggaaggcggtaccggtgacgtcgatgtgatcgccgccttcgtcaacccgggcggcgcctgtgtgcacctgatcagcgtgcgcggcggacgggtactgggcagcaagaacttcttcccgcagaccggtatcgacgaggacgtggccgaggtcatggcggccttcctgggccagtattacgtgagcagtcccgaacgcgacctgccgtcggagctgatcgtcaacgtggtgcacgaagacttccccacgctgatcgaggcgatccacgaactgcgcggccgcgagctggacatcagccaccgcgtacgcggcacgcgagctcgttggcagcaactggccgtgaccaatgccgaacaggccctgggcgcgcgcctggccaatcgacagcacgtcgccgcacgcttcgacgccctggccgaagtcctcaacctggacgaaccgccgcagcgtctggagtgctatgacatcagccactccagcggcgaggctacggtggcatcctgcgtggtctttgggccggaagggccgatcaaagccgattaccgtcgctacaacatcgaaggcgtcaccgccggcgatgactatgcggccatgcaccaggccctgacccgacgtttcagcaagttgaaggacggcgagggcaagctgccggatatcctcctggtggacggtggcaagggccagctgtccatggcccgcgatgtactcaacgaactggcggtgcccgacctgatcctgctcggcgtggccaagggcgccacgcgcaaggcgggtttcgagacgttgtacttgaatgatgccgcccatgagttcaccttgaagggcgactcaccggcgctgcacctgatccagcagatccgcgacgaagcccaccgtttcgccattaccggccaccgcgctcgtcgtggcaaaacccgacgaacctcaaccctggaaggggtggcgggcgtcgggccgacacggcgacgcgacttgcttaaacattttggtggcttgcaggagctatcccgtgccagcattgacgaaatagccaaagctcccggtatcagtaaaaagctcgctgagttgatttatgcgaatctgcacagcgaatagaatgcctttccacctcgtagccagttgtgccgatgaatatccctaatctgatcaccgttctacgcgtcctgcttattcctattttcatcctgttgttttatttgccgtacgaatggagttatgcggcctccagttcggtattcgccttcgcggccgccaccgactggctcgacggctacctggcccgtcgcctggaacagagcacgccgttcggcgcgttcctcgacccggtggccgacaaactcatggtcgccgtcgccctggtcctgctggtgcaggaacacggcaacctgtggctgaccctgccggccgccgtgatcatcggccgcgaaatcgtggtgtccgccctgcgcgaatggatggccgaaatcggcgcccgcgcccatgtcgccgtctccaacatgggcaaatggaaaaccgccgcgcagatgctcgcgctggtgatcctgctggccaacccgtcggacttctccttctgggtgttgaccggctacgccttgctgcttatcgccgccggactgaccttgtggtcgatgctccagtatctgcgcgctgcctggccgcatctgcgcaccaccgttgaaaagaaataaaacattttcgaatcaaggggttgaccggttctgataattctatagaatgcgcatcaccaagacgcgggaatagctcagttggtagagcacgaccttgccaaggtcggggtcgcgagttcgagtctcgtttcccgctccaaacacaaaaaaaagccactctaacgagtggcttttttttgcctgctgttccgtccagaatcgtgtccgccattcgaccagtctcgattggcgattgttcgcgcagcccaacggtcagcgcctgaaagcctgccttttggccatcgagacaatcaatagcgccggcagcagcagcgccaatgcaacccagggaatagcgctcgcccctcggcttcccaggagaacaccgccgatcacaccgctgcctgcaaatgccaggttaaacacggtgaccagcattgattgcgcaatgtcagcgccgtctccggcaacttcagccaaggcggtttgcaataaggttggcgcgccaccgaagctcatcccccacaagacgatactgatgtagatcgcactggcgggcaggtcacccagcccaagggcaagcgacaccaggctgaatgccgtcaggctgagcagcaccaggctgcgaagcctgccatcaatcagcgtgccgatcacccataggccgaacaaggccgcaataccgaatgcaagtaggccccgatcaacctgatcggccaagccaaccgaagccaggaacgctgcaatataggtatagagcgtgtaatgggccaggatccagagcatgaccaccgccagcaccggccgcacccccggggtttgcaagactctgcgcagcggcaggtgccgataggcgcgttgtccgggaaaatcaggcactttcagatagatccaggccatcagcaaaaggctgagtcctgagagcgtcccgaacacgcatcgccatcccagcagtttgccgagccaggcacccagcggtacccccagggccagtgctaaagggatgccgagcatggccagcgccatggcgcgaccttgcaattgtggggcgaccaagcgtctggcgtagccggccagcaggctccaggccagaccggtggcaatgcccaccatgaagcgcgccgccagcgtcaatgcaaaccagggcgacagggcggtgaccgcattgcaggcgcaaaacaccgcgaccgccagtaatagcaacaagcgccgaggccaaccctgcaacgcgagcgtcaaaggaatagccgccaaccctgagcccagtgcgcatagcgtcaccatctggccggcccacgcttgcgacacacccaatgcctcggcgatctgtggcaaaagtcctgcgggtaccgtttcgttggcggtggcgataaagctacccattgtcagcgccaacagggccgccagtggcagacgcccggtggtgagatgttcgagagtgttcgatgtcgtgaaagagccattttcaacatgtgatttgccagtcatgacctgtgctcagtgggaagggagggacaagtgtgatgaattgccacagatttgataattggcctaccatttgatgatctatcaaatttgaattgaatatgaccactgaccgattgggtgatatgcgtttgtttgtcgaggcggcggcactcggcagcctgtctgccgcaggacgcaaactggcactgtcgccagctgcggccagcgcgcgcctcatcaagcttgaggcggcgctgcgcaccaaattgtttgatcgcacaacccgtcagttgcgcctcacggaagaaggtcggttttacttgcagcagtgctgggtcgcattgcgggctatcgatgaggcggaagcggggcttcaagccagtcaaactgaagtgcgtggcaaggtgcggatatccgcgtctgccgactttggccgcaatcttttgaatgactggcttgaggcattcagtgtgttgcaccctgaactgtgcgtcgcgctgacgttgtcggattcggtgtcgaatctggtgcaggacgatattgatctggcaatccggtttgggcagccacatgaaagctcgatgatcgccaggcagttagcgcccaactggcgagtactgtgcgcttcgcctgactacctggcgcgatacggtgtaccccagacccctgctgacctggttaaccacaagttcatcgtgctggtgactggcgcagggccattgaacacctttcactttgtggtggacggtcaggcatggaaccacaccgtgcccatgagccaggcatgggagaccaacgatggcgcactcgcgcgcgcatgggcgttggccgggcatggcattgcacgtaagaccatctgggatgcggcagccgatatccgtgctggacgattgaaagtcctgttgcctgacttttgtgtcccggaggccggcgtctacgcggtattacatggcaaccgttaccgggttccccgcgtgcgggtcttgctggatttccttgtcgagcagttcgatcgcgcaaccgatgagctgctgtcaggtcttgaagtgcctgatgccaggcggtcgtaagccacgtcataccagataggggcgtggtcgctcagccttgggttttcctggcgcgggatttcttctgcgcaggttgagcgtcgccctcatcgagcgcgtcgccccccaggctgcgggtcagctgtacggcagcgctctgaaacagtgggtgcaacgtctgtgcctgttcggcggtcagtcggctcgcggggccggagagtaccagcgcgccaatcaggttttcccccgggccgaaaatcggcagtgccatcgaggaagcgtgcgggtccgtggcgcccacggagtaaatcggtttcatcattttcgccgccagggagtacggcgttctcaacgcttcggcgccggcggcgccgtccatggggcgcgtatcaccgggttgcaggtgcaggcgcaagtggtgcggtgagttcacgcgatagaggcacattcggtaagcgccatgcctgacataaaaggatgccgtttctccggtttcctgggtcagcgtgtgaagcaatggggtgatatgccgttccaggtcgagcccgtcctggtagacggtattcaagcgcatgatctccgtggccagttgatagcggccgtcggccaggcggctgatcaggccgtaattttccagggaaaccatcaagcgcatgatggtgcttttgatcagcccggttcggtcggcgagttcagccagctccagggcggtgtcgcccatcttgaacgcggtgagcacggtcagcacccgatcggccgaagcaaccccggtgactgccgggcgcgggcgaatttttaccatagggtggctccttgtgagggtggacgtgggctgtgcgtgagcagggtgcaaaatactgccattgtcgcgcgggggcaatgcgcgcgaaggattggccgcgcgcgctaaataaaacgctgctggcggggcggggcccggcagcagcgagagtgcagcctataggggaggtcagcccgcgctggcttccttgttgaactccacgggatcactcgatttgttcatgtgcttgcgtccgatcaacagcaccatgagtgcacccagcgcgcacagtgccgcgagcggcagcagggccaacgcatggctgcccgtggcatgctggatcgtgccgtagacgttgaccataaggccgccgccgatcaggttggccatcgcacccactgccgccaggcctgccgctgcggtggaggacgacagccaggtcgacaccagggcccagaacggtcccttcatcgagtaagcaccgatcagcaccatggacatcatcagcacggttgccaccagtgaagaggtcatcagcgccagcaacaggccggccgtgatcaacaacagggtggtcgcggtgtgccagcggcgttcaccggtcttgtcggagctgcggccccacaggatcatcaggatcgacgccaggccgtacggaatggcattgaccaggccgatttccaggttattcaagccaaaggtcttgagcaattgcggtgcccagacactcatggtgctgcctgccgccgaggcgccggaatagatcagcgccaatacccagatgtgtttgtggcgcagcagcttccacaacgagatatgcccgatggcggtcttgcggccgcgttcttcggccagtcggttggtcagccagccacgttgctcgtcactcagccatttggcttgctcggggcgatcggtcaatacgaacaggcaggcgatacccagcaacactgcgggaatgccttcgatgatgaacaaccagtgccagccgcgcatgccaaaccagccgtccaggctcagcagaaggccggacagcggcgagccaatgaagttggcgccgggaatggcaaccatgaagatcgcaaccatgcgtccacggtaggcggccggcaaccagtaggtgaggtaaagcagtacgccaggaaaaaagccggcctccgcggcgcccagcaggaagcgcatcacatagagcgagttggcgccctgcacgaatgcagtgcctgccgaaatcagcccccaggtaatcatgatgcgagcaatccagacccttgcaccgaagcgctgcaaggccaggttgctcggcacttcgaccaggaagtaagagacaaagaacaggctgctggcaaagccgaagatcgccggtgtcaggcccaggtcctggttcatctgcaaggaagccatgccgatattgccgcggtcgatgatcgccagcaggtagcagaggatcaggaacggcagcagccgccacgccaccttgcgcatggttgagcgctcaacggcgctgatttcggtagagctggtagacatgactctctcccattttgttttttttggagaagcgttatgacccgcactgctacttgaggcgtgcgggttgcatgaattcaatcactgcgcatagagatgacgattgaccaccgcgcgcgggtcgggcgcgatgccgccccagaaatcgatgatctgttgcacggccagcagccccacgcggtcccgcgcttcggcggtattggcgcccacatgcggcgtcgccaccagggtcggcaggccccatagcggcgagtcggcaggcggcggttcggggttgaaggtatccaggccggcgccgccgatctggcccgtgctcagggcttttaccaaggcatcggtatcaatcagctcgccgcgtgcggtgttgatcagcaggctgccggggcgcatgcgcttgaactgcgcctcgccgaacaggttgcggttctgctccgtgagcgggcaatgcaggctgatgatatcgcagtccgccagcaaggcatcgaagtcactgacctgctcaacgttgggcacgtcaggcaggtttttcaggtaggggtcgtacaccttgacctgcatgcgcagcgggccgaccagctccatcagaattcgaccgattgagcccaggccgaccaggcccaaggtcttgcccgacagctcgacaccgaccgaggtcgctttatcccaatgcccatcgcgcatccgtgcatccagcagggcggtgtggcgggcgacgctgaacatcaacgccagtgcatgctcggcgaccgactgcgcattggcgcccagggcaatggtcacgggaatgctgcgttcggcggctgccgcaatgtcgatggtgtcgtagcccacgccgtgcttggcaatgatcttcaactgcgcggacgcctggatcatgtcccgcgtcaggtgaccctggcgcacgatgattgcatcgggctgttcgcgcgcaatgatcgcagtgagttcgtcggcgggtaggtaggggatggtcggtatgacgcgcacgccgtgtgaggcggcgtgggccatggcttcggcagtcaattcagggccggtcagcaaaagggttcgggtcatgttgcgcaccttggtttttttatctgtgtgcagctggggggcgagtgacatgaccctcagcggtgactaaaacctaacataatgaaacggcgttgcaattaaaaagatttttttcaggtgtgaatgccgttctttggtcatgccgtagtgcctgtttttttcttgataaatcagcattttatttttgaatgagctgattttcatgtcttggtgcagtcagcgtttacgcgacgagctgcacgcaatgcttgcttgcaagtcaaaaaatgaaatgataatttcgaaatagcgtttcattttaattattctgcagtcgcgccacggcttacaaaaaacataagaaggtgaccccatgtccattggtttcagagtgctcgaacaagctcgcaaagtgcccgccgaatgggttgagcgctaccggacggtgcccgtcgccaacatcagcgactcgatgaaccgcatgaccgccggcggcgccagcctgcgtgccatgcaccgtcagggtgtgttggtgggaccggcactgaccgtcaaggcgcgcccgggcgacaacctgatgctgcattacgccattgacatcgcacagccgggcgacgtcatcgtggtggatgccggcggcgacctgagcaacgcactgatcggtgaaatgatggtcgcgtatgcggtcaaaaaaggggtggccggcattgtgatcaacggcgccatccgcgacgccgccagtatcggtgccggtgactttccgctgttcgccgccggcgtcacccaccgtggcccttacaaggacggcccaggcgaggtcaacgtggcgattgcgattgatggcatggtcatcgaaccgggtgacctggtcatcggcgacgaagacggcttgctctgcgtgccgtttgatcaggtcggtgaagtgtatgatcgtgcccacgccaagcatgctgccgaacaaaagcagcttgaacagattgcccagggtgaaaacgaccgtacctgggtcctgaaatctctcatacagaaaggctgcgagctccctggctgatcccgctacaccctggccgccgtgttcggccagggttcacgggcagggcgtcgcaggcttcatacctaaaggctcgctgtgacttctgttcccgtctcccgttggcccgcgccgatccgcgcattgagccatcgcaatttccagatctacttcgtgggtcagggcctatcgaccctgggtaagtggattcaacaggtcgcactggcctggctggcttatcacttgacgggttcggctgtattgctgggcacgattgctttcctgacgctgctgccccaattgttggtcggcccactggcgggcgcctggtcggaccgccacgacaaacgccgcctattgatgggcgtgcaaaccctgcttgccctgcaatcgctggtgttggccgtactcacctggcagcaatggatgggccgggaggtgatcatcgtcatggcgctgattctcggcttgctcaatgccctggaaacaccgctgcgccaggcgttgatcagcagtttcgtcgacgaccccagggacttgcccaacgcgctagtgctgaacgcaatgctgatcaacgccgcccgctttattggccctccgctggcggggttgctgatcaactggagtggcgaagccggctgttttctcctgaccagtatcgcgtttggcatgttgctgatcgggctgggcagagtgagaagccgcgagcaaaccaaggcccagggttccaccgcagagattttccgtgaaggcctgcgctacctgtggcgcacacttcatattcggcgtttgctgatcagcgtgatcatggtcaacctgctggcctcttgttacacggtgctgttgccgatcctggcaaaaaacgtgttcgccggcgatgcgcaaaccttgggttggttatggggggccgccggtgccggggcgtttgtcgcgacgattttcctggcgtttgtcggcggtgcgtcgaacctgcaacgcatcatcggcgccggggcactggtgtgtgcgatcgccttgtgcgcgatagccgccaacccgccgttgtggttcacgctgatcgtgctggcgggcttggggtttggcatcaccgtgagcaatgtcagcagcaacatgaccctgcaaagcaccgcgcccgaggcgctgcgcgggcgggtgattgcgttctacatcgccatgcgtttcggcttcgaagcgattggtgggttgttggcagggctggcggctgcagccttcagcgtgcagtggaccttgttgctggccggtgcactgctgttggcgtatcagggcgtcagtggatggttgtcagttcgcaggcaccgttctggcagggggccgtcagggtgacagtcggttcgctgctttgctggcaggcgactcgacagaacgcggcgctttaaccgacaccgataaccgcacgttatttcatgtccctggcctggatccacagcaccgcatcctgggacaggggtttgcccttgtaggttttggtcgcgccgatgttgagcgccgcaatgccccaccagccagcgcgtggcaggccgatggtcacgatgccttgggcatccgaatacgtactcaaggatttgaaggcggcttggggggcagtgacatagtccttctggccaaaggcgttgtttttgatgtcgaccgcatgattgacgtactcgatttcgatctcggcgaatggaacaggcttgccgtcagccaggaccaacgcgcggaacaccccacccgtccagtttgcatacggcttgttcaggggttggatctcaaccgccaacccttggggttctgacccattgccgggcacgccgcccacgttcacgacgagcttggtgaactgttggatgtagacgccttcctcggtttccagatacggctcaggttcgagtacgaaaatatggtcgcccaggggccgcaccaactcccgtggaatcgacgcacgataggcggtcactggtttttcgcgaccctgccactggacgggtttgaggtattggcgcaggtcggttgtttttccgccgtggccgctgatgaggctgaaggccttgggttcacccatggccatcgtcggcccaccggagaacggatgcgtgaacactatagcgaagtccaggtcggccgcacgctgcagcgcggtttcgtcaaggtagagcatctggaagtgcgcttgcgctgcgcaggtcatgcaaccgaaggtcgcggcggcaaaggcttggagcagtcgtcgtttgatcagcatggtcgggctcactttgagatgtcagaggactggatcgtggcgccatggttttcaccaccgaggaattccaccgagtacgcgccggcgggggcctggaacgtgtagctgttgtccttgtcgacagtcccttcgagcaatagcttgttgctggggtcctggacatggatttttcgacctgcggcggaactgccgtcggtgtagccggcttcacatttcacccagtcatcgtgctcgatgtagcagtcgaaaacggggccgtgggccagcgcggcctggcagaacagcagggcacctgccagcagtatcgggtgggccagatctcgcggtttcataaggtttcgttctccatggtcgaagtggatcactgcggcgtcgccgtttgggcggcagccactgcgggagcggccggcgcgaaggccgccagcaaggcgtcgaggttggcactcagcagcgcctcgtagctgttggccgggttggcgagcatgcccgggttgccgctatccaggatcagcaggcgtgcgccgccgtcctcgatggcctgtgcaatcctggcgtcaggcgcccatttgtgaaccaccacgcggatatctcgctcgcgaaggtagcgggtcagggcggcgcggtcggcgtccgtccagtcgatgtcctggcgcacgaaccaaccgtccacatacacgccgaactcgccgaacaggtagaccggctcgctgaccagcgacagcacgcgcaggtctggcactttcagcagccgatcgccgtagtcggccttcaggcggcgcatgcggccgtcgagcgcagcgaggttgcgcgcgatccgtggcgcgtcggttggggacagccgtgccaggtcggcggcaatcaatgccgacatgcgcatggcattgatcggccccagccaggcgtaaggcgacgggccgccttcgccgttgcgggcgtctgcccagggcacatcgtttgccggcacgcgtgtcacggccacgccgggcttgaggctgtcccaagagtgcgacgcatcgatctcgacgatccgcaggttgtggcgccgcgccgtcgtatacaacgggtcggcgcgccacaggctgctcagggtgaccacggcgacggccctctggaacaccgccggctccaggcgcgacagcgcgttggcctggctttccaggggcacggcggcgtccagcgggacacgtacgacctcgatgtgcgtgccttcgccgagtgccgaggtgagcgcatacatcgccggcagggcgacgagcactggctgttgctcctgcgcaaaggctgacggcacgccacccagcagcagtgcgaacagtgccagccaagggcgaattgaagtgttgaaccttttcatacgctggcccctttgaactgcggcgcggtgccgcggatgagggtggtgaaggcaaataccaaggctgcgacgatcacgatggcgccgcccgtggggaccggaatatggaactgcatcggtgccagaatcccgaccacacaggaaaaggtcgcaatcaggaccgcccacgtgaccaggcccggcagtgagcggctgatgttgcgggctgcggctgccggtatcagcagcaaggcctcgaccagcacggcgccgatgatcttcaagcaggcgaccgttaccagggtgaccaacaccacgaacaggtactcgacgctgcgcacctttacgccgcgcgcatgggccaggctcgggttgaggctggagagcaacatgccgttgtacaggggcagcgcgatcagcgtgcaaatcaccgtcacgcccagcagtacgttcatgtcggtgtggtcgaccgccaggatcgagccgaacagcacgccttccatgacgtgtgtgttgattttcgcggacacgaacagcagcaatgaggcaccgaccgccagcgagatggacaggaacacgccgatcaacgtgtcattggccagggtggtgcggtgctgcgtgtacttgagggtcagggcgaacagcaggcagaagccgaacatcgagaagtagggcgaggtgtaggactcgccgatcagcacgccaatggccacgccggtcatcgccgcattgcccacggactggctgaagaacgccatccgcttgatcatcaccatcgaacccagcactcccagcagcggcccgatcagcactgaacacatcagcgcattgatcacgaactcgtattcgaacggttgcggcaacatctggctcgcggcgagcgcctggaggtggtcgcgaatgaagtcgtacagggcattcatcgaatggcctccagtcggctgtcgagctgatcggcagggccgtgaaacagcacccgttgattgataacggtcacggactgcgcgatacgcttgacctgttcgaggtcgtggttgatccacaaaatggtcaccccacggcggttcagctcggccactagcgcctctaccaggcgcacaccaggctcgtcgatcccggcggtcggttcatcgaggatcagcagccacggcatcgggctgatcgcctgggccagcagcacccgctgacgctggccaccggacaggctgccaaagggttttttacccatccccgccatgccggtacgctccagggcctgggcatgggccgccttggcggcgcggcttgcgccgaggaaggcgggccggcgttgacccaacagggccatgagatcgttcactgtcatcggcacgttgcggtcgaagtccggcaactgcggcacataccccatgggcgtcgtgggttcaccctcgagccggatcgttcccgaatgcggcatctggcccagcagcgcacgcaccagtgaggttttgccgccgccgttggggccgaccaggcagtgcaatgcgccggcctcgatgcgcatgctcacttgatcgagcacctgcgtgcctcccagtcgcagggagacgttgtcgaacacaatggcggggccgcgcatcgcgtgttgctccttcagcgcgttcattgctgcgtaaactcgacggcttgcgccagggtctcgaggttttcgcgcatcgcgacctcgaattcgtccgcgctgtagctatcgccggtgatatgagacagggcgaacaccttcacgccggtggcggcttcgatgggtttggccaggtcgagggagaagttcttttcggcgaacagcaccttgacgttggccttcttgatcgcctcgatggtgttggccaattggcgtgccgtcggtgcgacgccatggcgcggctcgatcacggcgcttacgaacaagccgaactcctgcatcatgtagtcgtagccggcatgggtcgtcgcacagcggaacgacgacaggtccagtgcggcgaagcgcgtcatgaagcctgcgcgcagcgcacggatacggccggcatacgccagcgcattcttgcgatactcgcccgcgttgtccgggtccagctcgcccagccggcgagcgatttcgaacacctgttggatcgctgccgtggtcgagacaaaggtgtgcgggttgaccaccttgaccccttcctggtcaccgccgatgggaatcagcgccaccgtggcattcgcctggataatcggcagcgtttgcgtgcggccggcggccttgatgatctggaaggcccattcatcgtgcccgataccgttgaccaccagcacatcgatattcatcgcgcgggtgatgtcatcgggttgcggctggtaattgtgcgggttggcctctgccggaatcagcgcaatgacttgcgcccgatcgccgacgatattggccacgaagctgtagtagggatgcagggtgataccgattctgagtggcttcgccgaggcgaaggccgggccggcgagtgcgatggcggtgatcagcacccacagcgcgatgcaacggcgccacacggcgcgatgtttcgtagaaacagtcatggctgggttccttttacgcgttcgatttcgctggcaccgtcgtacgggatgacttggcgccaaccatcgccgaccagggattccggcttgacgatggcggggtagggcgcgttcgggtcacggtggacccagatcgtcgcctggttggcccacatcacaccggcgtgggcgtggccgatgatcagcaggtaggcgctctggcccggcgcgtggccggctgagccgtaatagaccgtggcgccctggcccagggtggccttggacacatcgctgacggcaggggccgccgccgtggcgtcgtccgctccacccggatgggccaggtgggtgccgggcagaatcaattgccagtgcacctcgccattggccttccagaaagcatcacggtagaacggcggcagcaacagctcctgtgcacgctccagggtgatccagccgccggtatcgttgttgttccagatgatttcctcgccggccggcagcaaggcgctgtggatggcctgatcgaccgcacccaagccgtcaaaggaacgcacctgccagctcagtggggtgggggggccgactctttccgggcgcagcatcacatagccggccacgctggcgatgacggccagggtcgccagcagcaggcccagtgactcccatgcgccggagcgtggtcgcacctgggtgatcgcagcggctgggcgcgccatcagaggaacgcaatccagcggcccaggaagaccacgccggcccacaacagcaacgagctgaacccggcgacacgcgcctgacagggaggcggcagcgtcgtgtcccattcggcaattcggcgaaaggcgcccaagtggaacaccgccatgttggcgccggccagcatcagcaggcccattttcagcaggaacgcggtgttctgcacataggtcgtgccattggcacagaacatcagcaggccggtgatcacgcaggtcacgaacgcgacccaggtgtagggcagcaaatcctggatcagtttcagcgcgccgcgccggtgggcggttacgccaagcaggcgcaggtcaacgacggcgatggtgccgtagacaatggcgatgccgattacgtgcaccgattccagcattggaaaggccgagcctgactcgcggatgaacgtcgcgacaggcgtgtcctggatggcttgcagcaggggttgaatatccatggcgaatacctgagaactttcgttgaaaacacttagatcgtgtaggcgatccagcgaccgcaaatgatcacgacgcaccacaaaccgatcgacagccatgcgcatgccttgaccgaacgcgtcgtgtcgtcgctgcctgccgtgccggcagggcgcagcaacggacgccgcagcagccaggtcacgctgaacgccgtcaccaccaggaccatcttcagccagaacgtggagttgacgagtacccggtcaggctcggcgatgatcatcagcaacccggtacacagcagcacgatcagtgcattgcgcatccacgggtagtaacggcgaacgatgccgcgcaagggttcctcgcgggcgaacacccccgccagtcgaaggtcggagatgagcgccgagccgaagagcacggtgatggcgatgatgtgaatgctctgcaccgtggggatgacccacaggatgtcgcggatcgcagtgctgaacggtgaggcgtagatccaggcaatgatgagtgaagatgacatcggcttttcttccgcagtgggttagaagtcttgaggggttgcgatcggatgcagccccgccgcgtcctccggcagcaagtagccttccttgatcgaagccgctttggcgtcttcgaatttctgtgcatagcggctgaagcttccatagtgcttgcccagcacttccttcgaataaggcactttggtgtcgtagatcagcccgcagccggtctcttgatcggtgaggtaggtggcgctgggcacctggatccacggcgggcgcacaccgccttgcaggttgccggtggcgggcgcccgcgcggcggccttgccatcacggaccacccggggcgcgcggggcatgggtttgccgtcgcgtacccattggtccatgccgtcgagcagtgccgagaccacgtgctcgaccggttcgtcatacagcgtctggcagcgcgggtcgtcgcccttgccgacgtcggccgcgagcggttcggtgtgctctgtgccgaggtcggccaggcgcagatggggcatgccggtcacttcgtagtagcgaagctgcggggtgtcggtgtcgggaggcagtgggataccttcgatcacgtcgtgcatcagttcggactggctgaagacggtcacgaacggcacgccttcgggcatctggcgaggtactcggatcacatcgccgccgacttctccgtaggccatgcggcccgtcatgtaagcgtcgatcagcggcgtatcgtcgggcatgcgccattgctggtgacgcccctggtcgagatagtccatccagacctgcgcggtgacggcccagctattcacatacacgcgctgcacatcgaggcccgccagcggactctgcgccccattgctcttgagcagcagcgccagttgcgcaccgatgccctgggactgtggcacgaagggatcgggcgctgcgccacgggtgaaccgtgccgggtcgtaataggtgcccagcggcgcatagcgcgcgtagtcgaagcggcgcatgaactcgaaattcacgatccgtccgtactggtcgatttgcgccgcctcggccgccggggtgtccgaaatgaacttggggtcgactgacggcttgttcacattcagtgtgtacccgacgtacgcatagccgcgccgcagcaagtagtcacgcgtcagtatccagcctgcgccacgctcgccgaaccagctgaacggctcgatcaccaccgtgccattgaagcgcgccgggtcggccggtttgcgcaccagaatgcgcgtggtgtagggcgcttccagcaaggttttaccggcggcagtgatggccggggcgacgccttgcaggtagtactcttgctcgatgtagccgtagtggtcgaggtcgctgtactcagtgcccgggcgtgtcgccgacgacagcggcggcttgtcggaaggcggcaccgcgatggccgtgggcatgcgcggcacctcggcgagcacgctcgacgcgatgaacagcgacaacgcgatgctgatgggggtcaggcgtttcattcgcaaaagctccggcaggggtgggagggtggcgtcactcaaggctcagggaagccttgccctcgctgtcgatcacgatctggttgttctcgcacacgtactcttgaatggcgtagttggagcgcttgtactcgaacgtaaagcgatacggagtgttgagtacctgcgggtcttcgatcaggacctggttttccaggtgatccggcccgcgcaaccgcatgcgttcagtgatcttcatcgccggcccgtggggcacgtcgtagaagcgcacatcggttcgcacgcgctgggtctcgacgaccagcgtgtcgccttcccagtggccacgcgaatggccctggtacaacgggtcgagcttttccaggggcggcatgggctggttcaaaagaatccgccgcacctgctggagatactcgccgaggatgatcacttgcttgtcgtcgcgaatgatctggatcgggaacagcgctgccatcatcgtcggcatgccctcgggcaggcacttggagctggtggttgcaatcggcgtgccggcctcgttggccacggcttctttcttcttcagctcggcgtactcggcggcgtaggacgccttgaggtccattgggccgccggggtgcaccgggtcgtccgggttctcgccgaaccagtcgtccggggttctttcccaggtgccgctgatgtctggccgtgtggccacgccgtgtttgtcggttggggggtttgacgctgtcgcggcgctgctcatcgcggcgaaggtcaggaggaccacccccaggaagaccatggcggtgttggcggtgcgtgctggtttcattgaaatgtctccgcgttgctggtttgcccagttctgttgttgtcgtgctcgcaaagggttgcgtttaaccgccgcccgagagcaccacgtcgcccatcttgatctccaccagcagcccgcccggttcgccgtttttcaacggtttgaacgacacctcggcgtttgcgccggccttgaccgagtcggcagtccagcctgtgcgctgcagcgcgttgacgctgcccgtctcgatcttgaagcgctgggccggcgggccgggaacatcgacgtagatcgtgatgtgcgggttggtccaggcgaagcgctcgaccacacccttgatcgtgattgtctgggtctggtcgaacagcgcgaaggaatggtgggcactggcaacaggcgccaaggcactgcaggcgatgagggtcataaggcaaagcctttgacggagcgacggaaagcgtgacgaaggggtcatgacgggtgcctcggtttttatggttcttatgggcccagcatagggtgctcgcgctcactggccgtagccgaaaacggcaaccattgaaggtattcagggggggtggcgcaggtgaggtatcgcgcaacgacagaacgacgcgccggcccgtgcagatgctgatttgggttaccgcgttggcgacccctgccggaacactcgtgtctcgcctcacaactataaaaacaggagagacgtcatgcgcattcccccctacgcgccattactgtcgctggttgcactctgtgcagtcggctcacaggcacaggcttatacgctgtacaacgaagacgacggagcaaccgtgttgaatgccgacctgggcgccgcattcggctggtttggcagtacccataactacctgggcgatccgcagaaaaaatccggcggcatgcactggcaggagggttacgtcaaatacggtctgaccggcaccacggataagctggttgccggttcggtatatggtggcttcagcctgctcagcagcgggtcatggggtgacggagacatgggggcgaccacggcgggcaatgagcgacgaaccgccgtggaagacgcgttcctgggctggcgatcaggtgacctgctacccgccctgggcaaggatggcgtggatttctcattcggacgccagattgtcacggtggacggctttctgatcaccgacgatggatttgacccgggtaacgccttcaaccccatcgagggcgtgcaggatggccgcttcaaccgagggggcgccttttacctgggccaacgcctggcgtttggcaatacggcggtgctgaagctgggcggcaaggaagggttgcacggcagcttgatatggctgaagtccgataaccctgggcagtccaagaccgaactggccgtgggcactatcgattacaccacccccatcggttcgatcggttcgacctacgtgcacggcctggatgtggaagagaaatacgccttcggcgatcggcttgagcgcaagggcatgaacgtctacagcattcgcgggcagggcaacgccgggatcgagaacgccgattttgcgttcgaggtggcccgccaggaaaaacgttcggggtcacagcgggcgatgttcttcgacgcgggttacaccttcgtcgatacgccatggcaaccgacggtcagctaccgctattcgcgctactccgaaggctgggacttcctgttccagggcggttatcgcaagcgcctgcagggcgaagtcgggcttaattatgcgggctccgtgacatcgaacatgcagatcaacgacgtactgctctcggtcaagccgaccgagaaattgacccttaacgcgatggcgttcgactaccaccagctttcccgccgtcatgagctggatttcgctgcgcaggagctcgatctgtttgtggattgggcggtcacggagaacatcacgctttcgccgctggttggcttctacaagccgcagaagtggctgggcaacggtggccggcagagcggcgacgcatcaaccaacacgtacatgcagttcattgtgtgggcgacgttctgatgattcattgaggtttgttgcggggccgagcaggcgttgacgttttgcgtcaacgcctcatcccgtcagagcatgcggcgcaacacatcgttgcgtgggtcccggtcatagaagcgatgcttgagcgcgcccgccacgtgcagcacgatcaggacaagcaaggtgtaggcgaggactttgtgcagccattggaagaccgcgaaccaatcgtcattctttggcaacagctccggcaggttaaccccaaaaaagaacaccccgtcgctcatcgtgtacgtgctcgacatggagtaccccatcaagggcacgatcaccagcagtacatacatgacgcgctgcgtcaggcgtgacaaaaccctttcgtaccccgccagcgtttccagcggctgcggcaacctgggcgtgcgcaagcgcacagcgagctgaaccagcaccaccaggaacgtcaacaccccgaaggacttgtgccaggggtagtaaagctcgtatttgctcgccacctcatcgttcatgccggtcatatgccagccgacccagagcaggcccaggacgagcacggcacgtacccagtgcagcacgcgcagggaggtcgggtaccgatcgattgtcgattgatctattgggttcatatcaggctctccacggagcgatgcacggttcaatggccaccctcgacgtgggagggtggctcggtcagggcgcggtgatcaggtgggcagcagcacggtgatgactttctcctcggtgtaggccagtgcgccgctgaacccgccttcacggccgatcccgctggtcttgaggccgccccacggcaggttggcgtccaacgggctccaacagttgatccccacggcgccggcttttaccgccgcggcgacgcggtgtgctctggccaggtcgccggtccagaccgtcgccgccaggccgtagctgctgtcgttggccagggcgatcgcttcggcttcgtcgtcgaacgttatcagcgtgccgaccggtccgaagatctcgtcccgggcgatttgcatgtcgttgcgcgcgttggcgaagatcgtcggacgcacgaaccagccctgcttgggtgtcgatacgccgccggccaacaaggtcgcaccttggtcgatgcccagttggatgtagcggttgacgcgatcgaattgggctttcttggcgaccgggcccatctgcacgccgggctggcgaggatcgcccacgttcaccgcttgtgcagcctcggccagcgccgcgccgaaccgctcggcgatgctgcgctgcaccaggatacgcgaaccggcggcacacacctggccctggttggcgaacaggccgagcgcgcagccgcgcagggcgtcgtcgaaggatgcatcgtcgaacacaatctgcgggctcttgccgcccagctccaaggccacgcgcttgaacagcacgccggcggtgcgctggatttcgcgcccggcctcggggctgccggtgaagctgatcttggcgacatccgggtgttcgcacagggctcgacccacttcattgccgtagccggtgaccacgtttatcacgccgtccgggaagcctgcttcctgcgccagctgcgccaggtacagggctgactgcggggtttcttcggaaggcttgatcactacggtacagcctgccgccagcaaggcggcgagcttccacaccgtgatcatcagcggtgagttccagggcacgatggcgccgaccacgccgactggctcgcgcaccgtgtacgacagggtcttggtgccgaagtagcccccagtcggaatggtccgaccttcaagctggttggcccagccggcggcggcgcgcaggttggcgatcgcgttgggcaggtccatccggcgtggttcgatgggcgagcgcccgatggcgttggcgtccagatcggccagcacgtcagtgtcacgctcaaccaggtcggccagtttcgacagcaaccggccacgcagggcgccgttgagctggctccagtcgccgctttcgagttggcggtgtgcagcggctacggcacggtccacgtcctcgctcgtaccccgtgcgcagtcgccgtatacctgctcggtcacggggttgacgaggtcgattcgacgacggtcgaaggcttcgcaggaggcaccttcgataaaatggttcaagtgctcagtcattttggggtccttgagtgatgggcaaaatcaagccttcagggcagccagggcgtcgccgaagatatccagtgccttgaagaacagctcacgcgagatcgtcagcgagggcatcacgcgcatcacgttgctgtaacggccacaaggaatcatcagcacgccgtggttgagcaggtagcccatcagttggccgattttctcgcccgccaggggcgccttggtgagcgggtcttcgatcagctcgataccgatcatcaggccgcgcccgcgcacttcgcccaccaacgggctgttgaaaccacgaatatgcgcctgtgcctccagccccaatgtgtgggcgcggttgagcaggtcgagttccgggtcctggaggatgctgatgttggtcagtgccaccgccgccgacagagagtttgccgcgaaggtgttgggcatggagccgtcgggaatctgcgccgccaggtccgagcgcatgatcaggccggccatgggcaggtcgctgccgatgcccttgccgaaggtgagcatgtccggtttcacgcctgaatgttcgaccgcccacatcttgccggtacgccccgcgccggattgcacctcatcgacgatcagcaacgtaccgctgcggtcgcaggccttgcgcaacagttgcaggaattcgggtgagggcggcacgtagccgccttcgccctgcactggctcgacgatcacggcggccacgtcatcggcggcggtgtagggggtgttcagcaggtagtcgatgtactcgccggcgatctgctcggcgcttttgtgggtggtgtcgaaggggaaccggtaggcgtaagggtagggggcgtggatcacgccgcccatctgggcaccgtagcctttgcggtacgcggtgcccgtggtcagggagcccgatgcgttccagacaccgtggtagccgccatggaaggcgatgatctggtggcgtccggtgatgcgcttggcgaacttgatcgcggcttccagcgcgtcgctgccgctctgggtgaagaaagtgatgcagtcgccacgcaagccgtcgggcgcgatctcggagagcttggcggccagctcggtgcgtcgggtgctgttgatctcgagggcatgcatcagcacttccgactgctcgcgaatggcttgcaccaccttcggatggcagcggcctacgctgctgacgccgaccccggcggacaggtcgatgtaggtattgccgtccggatccttgaaggtcgcgcccaatgcgcggtccatggccaccggcatacgtccgccaccacgtgccattgactcggtgcgcgccgacagcgccagggcttcgagggtcctgggcccaggaatggtctcggagatgatccgtggggcatccgcaaaatgcagggattctagtttggcttcactcatgacggtctctctggaatgtcgattcaagtgtgccgatcatctccggggtgcattccagacgggtagcccgaatcggcacatgggaaagcgtgtccgtggcgggctgctgccaatcggaaaagtgacaaataatttgcaggatttctgctatgtgcgaatatcacctgggaaggcaagctaaaaataagaatatcggcagaggctttcggcattatgaaaaaccagaccatcagccattcccaggacattcacgttcacgccgccactgttcagcagtggagccaggactacagccaattgacggctgggtccgccgaatgctcactcatgcagttgacgaccgccggttgccacgtattccgcgagcagatcaaccagcgtgtcgtgcaacacggcgtctctccccgaggcaagatgtgttttgcggtgccgatcaatgttcccggtccgattcgcatgcaagggcgggaggtggacgacagcagcctgttctttctccatggcggcgaggagttcatgttccacatgcctctgggcatggagctgttgtccatcaccttcgagcgtgaactgttcgaacaggccttggcgcaaaccgcttcggcgaaggagctcaacctgttattgcgccaaccggtgatccgggtttcggccacacggttcgcccaggcgcgtcgtcgtctgctgacgctgttctctcaggccctggtgcaggaagagctggacagcacgcgcgatttgcaacgcgagcaggcgctggaacaggccatgttgggtgagctgctgcaactgatgactgacccggcctgcgacaagcaacagcgctccaccagttccacgcgcagttttattgtggagaaatgccatcgcctggcgaccgagcagatgctgaatgtgccgagcgtcatcgagttgtgccagcgtctacaggtgagtcggcgcacggtgcagaacagtttccgttcggtgactgagacgacccccctcaactacttgcgctcggtcaggctcaacggtgtgcgccgcaccctgatgtccactcccgcgtcccacctcaccatcggcgatgccgccgctcaatggggcttctttcacctcagccattttgccgccgaataccatgagctgttcgcggaattgccctcccatactgcccgtgccgccattacgcgttgtgcttcggtctgatcgaactcacaaggatgtagaacatgaatagcctgcgccgcctgctggcggtcttcgatttgtttcgcccggaccagcccgtcattgacgtcgacatcatttgccgggaactcggttatacaccggccactgcctaccgttacctgcgagagctgggggatgcgggtttattgaagcggttgccccggggttatgcgctgggcccgcgcattgtcacgctggagcaattgatgactcactatgatccgctgctggcgtgcagtcaggacctggtcgaacagttggtcgccgacacaggcctggatgcgttggtcagtgagtggcatggcgactcagtggtcaatgtactggtccagcgtggcaccgatgccggaccggtgggcggcggcagggggcagccgatcagccttttccacagcgcgacgtcccgggtggtattggctcacttgctgccacgccagatccgacgcgtgtatgacgctcacgctccggtcgctgacagcccgcaacaagggctggaatggaagaccttcaccaagagcctgcttgccattcgcaagcaaggctactgcgtcagcgacggtgaactgcacccgggacgcagtggcgtcgccgcgccgattttcgacgacaagcggcgggtcatcggcagcatgaccctggtggggcgcagtgaacgcttccatgcgttccagcagagctacctgcgttacctggtgaccggcgcggcgtcggagttgaccagccgcatcgccttgcgctgagggcggcggggcaggcggcgcgacagatgaccgatttgggctaccgaagcgttcccggcaggcctaggatcaggccctgcgtgcgatcagaacgacaagcgactcggtgacggtgcgagatggactgcgccgatcctacggtgactgcctcatcctataaggtcaacaaaatgagcgtgactttgccccacaatacgccccacaacccgccccacaacgcgcccccaaaaaaacccgacgaaaccctcgacacgacgtcgcccaaccgctctaccgagctcaagcgtggcgccctgggtgtcggtttcatcatcttcttcgtggtgtcggcggcgagtccgctcagtgtgatcgccggcggtttccccattggcatcatgctcggcaatggcgcgggcaccccggctttgctgatcctcgccttgctcgtgctgctggcgttctcggtgggctacaccaccctgtcccgacatatcaccaacgccggcgggttctacgcgttcaccgcccgtgggctgggtggcctggccggcggcgctgccggggtattggcgatgtttgcctataacatcctgcaggtcggcttgtatggcatgtttggcggggtggtcagtggcaccatgcaaagcgcattcggcctggtattgccctggtggtcctactcgctgatggcgatggcgagtattgcgatcctggggtatcgcaagatcgacctgtcggcgcgggtgctgtcggtgatggtgatcgccgaatacctggcgatcctgatcctggatttcgccattctcaaatccggcggcgacagcggcatcaaccttgattcattcagcagccaccacgtattcagcggcaccccgtccatcggtttgctgttctgcttcgccgcctttatcggctttgaggccaccaccatctacggtgaagaggccaaggatcccctgcgcaccatcccacttgccacctactgttcggtgttgctgatcggtggtttctacgcgttgtcggtatggtcgatggtggtgggggtgggggcggacaaaatcgtgccgatgctgcaggcgttgcaggatccgaccacatttatctatggcatgtccgaccactttgtcggcccgcacctgacccaggtcatccgcgtgctgttcatggtcagtatctatgccgggttgctcgcctttcacaatgccgccgcgcgttacttctacgccattgggcgtgacggtttgttgcaccgccagttgggcaccacccatcgcgtgcaccagagtccccatatgggttcggccttgcagagcctgatttcggcggtggtggtgctgattttcgctgcgatggatgccgatccgatcctgcaattgttcgcctggctgtccaacctggcgacgttgtgcgtgatcttgctgatggctctgacttctgcggcggtgctggttttcttccggcgccaccccgagctcaaggtcggtgtttggcgcgggcagattttccccggtttctcctgccttgcactgtgggtggtgctggtgctggcggtggtgcatttcgatgtactgaccggtgccagccaactgttgtcctacagcctttgcgccattattccgctggccctgttgggtggtgtgttcctggcggccaggctgcgcaaagtatcccctcagcggttcctggccctgggcagccacaagctttaaggcgcggcctgcgctgctggcttgctcagcttgaccagcagcgctgcaatcaacagcagggctgcggacgccgccagcaccgcgacaaagcctgcgtcaaacgccgaacgggcggccgcgctcaacatcgcgcggccttcgggcgacaaggtttcagcgaccaccagcgcatcgtcaagactctcgaatgtcgccgggttgcgggtcagccacgctgggatcatcacgcccgccgcattggcatagatcgctgacagcaggctgccggcgagcgtcacgcccaccgcgccgcccagctcaaaggacacttcttcgatggacgccgccatgcccgcctggtccgcaggcacgctgagcatgatgctactggatgaagcggtcagcgcggcgccaatcgtaaagcccagcagcgcgaggctgatgatttgcgcaggtgccgtagcgttgtagagcaacaggtaggacagcatcgccgctgacgacaacagcaatgtccagaacagcatgcgttggttcccgaggcgaggcaggtaatacccggcaagcggcccggagatgaacgagcccaggggcagcggcaggatgaacaatgccgcctccagcggcgacaagcccagcaccagttgcaggcgctggctgaacaccagttccatgccgatcaacgcagcggctgataccaccgctgaaataaccgcgtttctgaaccccggcgccttgaacagcgcgaggtcaagcatcggttgtgtggctcggcgctggcggcggatgaacagcgtcagaaacagcgtgcccagggccattgccaccagcatgccctccaacgacgctgcccgcttgccgagctccttgacggcatacgccacgctgatcaacccgatcatcacctggagcgaccccagccagtcccagcgtttgctgatatcccccggatgattggggatcaacagcgcgcccaccaccaacgccaccagcacaatcggcacattgatcagaaagaccgaaccccaccagaaatgctccagcaacaggccgcccaccaccgggccgaacgcagcgccccctgacgcaaccgaggcccagatgccaaatgccatggcctgttcgcgtgggtcgctgaacgtcacgcgcacgatcgccagcgtggcgggcatcatcatcgccgcgccgaccgccagaaacccacgcgcgccaatcagtacgccggcggtgggtgaaaacgccgcgatcagcgagaacaggccaaatacgccgagcccgccgatgaacaggcgtttgtgcccgaggcgatctccgagcgtacccatgcccaacagcaggccggcggcgatcagcgcataaatgttgacgatccacagcttctgcgaagccgaagcgttcagctcgcgggtcagcgtgggcagggcggtgtagagcaccgtcatatcgatgacgatgagcagcaatgcgctggaaataatcgcgaggatcagccagcgtcgaggagaggtcatgggacgcgctcggtgatggaaagaggaaagccggtgccggtcagtctgtataagccgccggccccttacacacggaaatgggccaccagttgttgttggtgattggccatgtgatgcagtgagtcgctggcttttgaagcatcgtccatccggctggcgagtgtttcgctgataccgcggatgtcgctgacccgatggctgatgtcttctacgacggtgctttgctccatggcggcactggcaatctgctgattcatctgttcgatcacgtctacggcctgggagatgcgctccagcgccacccgagtctgttgcacctggaccacgctgccgctggcttgctcgcggctcagttgggtactgtgcaccaccgactggctcagctgctgcaaggtctcgatcaccgtgcgcacctgttcgactgaatgctgggtgttgctggccaggtgccggacttcgtcggccaccaccgcaaaaccacggccctgctcgccggcccttgccgcttcgatggccgcattcaaggccaacaagttggtctgctgcgcgatggaactgatgacgtcgaggacctgaccgatctgggcactgctgtcggcaagcgcgttgacctgcccaagggtggtttccaggcgctggtcaagggcctcgatactgcgctcggcggtcgagaacaccgcctggcctgagcggctcgcgctttctgcggcggtggcggcgtcggcagcactgtgggagtggcgcgccacttcctgtgcactggcgctcatttggtgcagcgcggtggccgccaactccacctcgtgatactgacgctgcatgccggcactgacttcacgggctatgccagacgaggtgtcggcgctgttgcgggtgtccagcgacgcgctctggatatcgcggataatcggctgcaacgtgtccaggaaccggttgaagccattggccaagtggcccaactcgtcgtgcctgccgacgggcaggcgctgggtgaggtcgccgtcgccttcgacaatcgcatccagcaactcggccattttcagcagtgggcgtgtcacgccgtgagcggccagccagatcagcaacatgcccaggctgctggcaagcatgcccaggcccaggttgagccagttggactcacggcttttgctgtccaggtcgttttgcatttgccgggcaggtgcctgcacccgtgcctgcgggactttgatcgccagttgccaggccgggccgcctgccacggtctgcacggactgacgtatatcgagggtgtccccggagacttcgccactgcgtcccgccacttggcccgaggccgacacaatggcgacttcgctgtcgccctggtacaggtcctggccgaggttggcggccagcttctgcaacgtatcgaggctgatatccatgcccacgacgccgagcaccttaccgttgacgatcaacgggatggaaatgctgctcatcagggtgttccggccttccacttcgatggtgtacggctcgatcacacacacccgtctttgcgcttgagggcaggcgtaccaggcgtttccgggttcgctgccgggcggcgcggtgttggcggcgatttgtgcctcgctcaacacctcctgcaccaattgccccggctggctctgcgaccaatacagcgcaaagcgcccgctgtcgttccccgccattgcgcgttgaccgcgccaatcggcatccgcgccggccagtgcatcaggcagcatgatgacgtacaggccgaggactttttcgcgctgtttcagggtttcacgggccgtagcgatcaatgcttcgcgcaattgcgcgaccgtcaggcgcccattgagtgtctgctcgcgcagttgcagaacctgttgcgcgaacccttcgccatacaaggcggtttcgttgaaaaaacgctccacctgttggccatgcgcaacggcctgggcctgcaagcgttccagcgcagcctgcccgagcaacgcgttgctctggtctttaagcagctttgcactggttttgttctggtacgcgctggcgccaatcagcgcccccaccaccgccagcaggcagagtccgctcagcagtgtgatacgccattggagggtgaggtgagctagacgcatggctgaggcttcctgcagagggctttggcggcgatgggctgggcagcgagccctggtttttatgcttgttgccggcacccgggcatagcgcgggtgatcctaggttgcggggatgacaggccaggcggctatcccaaatcggcaaggccggtgggattgcccgtgcagcgccgacctgttttggggcggggctgtggatgctaccgatttgggatagcgagcggttcgggggcgggcataggatcaaattcagcgcgtaaccaaaacaagacgctacccggtgccgatgcggtgtggtcgggccaaccctaaagcgactgcctcatacaataaggtcaataacatgagtgtatctatcccggtcaacagctccacggagctcaagcgtggcgccctgggtgtgggcttcatcatctttttcgtaatatctgcggcgagtccgttaagcgtgatcgccggcggcttcccgatcggcatcatgctgggcaacggcgcgggcaccccggcgctgctgatccttgccttgctggtgctgctggcgttctcggtgggctacaccaccatgtcccgacacctcaccaatgccggcgggttctacgcgttcaccgcccgtgggctgggtggcctggccggcggtgctgccggggtgctggcgatgtttgcgtacaacatcctgcaggtcgccctgtatggcatgttcggcggggtcgtcagtggcaccatggaagccacgttcggcctgctgttgccctggtgggcctactcgctgatggcgatggcgagcattgctatcctcggttatcgcaagatcgacctgtcggcgcgggtgctgtcggtggtggtgatcgccgagtacctggcgatcctgatcctggacttcgccatcctcaagtccggcggtgacagcggcatcaacctggattcgttcgaccgcagccatgtgttcagcggcaccccgtcaatcggcttgctgttttgcttcgccgcctttatcggttttgaagcaacgacgatctacggcgaagaggccaaggatccgcaacgcagtatcccgattgccacctactgttcggtgttgctgatcggtggtttctacgcgttgtcggtatggtcgatggtggtgggggtcgggtcggacaaaatcgtgccgatgctgcaggccttgcaggacccgaccacgtttatctatggcatgtccgaccactttgtcggcccgcacctgacccaggtcatccgcgtgctgttcatggtcagtatctatgccgggctgctcgcctttcacaacgccgccgcgcgttacttctatgccatcgggcgcgacggcttgttgcacagcgtgttgggcaccacccatcgcgtgcatcagagcccgcatatggggtcggcgttgcagagcttgattgcggcggtggtggtgctgattttcgcggcgatggacgctgacccgatcctgcaactgtttgcctggctgtccaacctcgccaccctgtgcgtgattttactgatggcgctgacctcggtggcggtgtgtgtgtacttccatcgccatcccgagcttaaggttgggatgctgcgcggacgcatcctgccggggttctcatgtctggcgctggtgctcgtgctggtgctggccgtggtgcatttcgacgtactcaccggcgccagccaactgctgtcctacagcctctgcgcgattattcctgcggcgctgattatcggcattgtgctcgcaatgcgactgcgatcgcgctcgccgcaacggttcctcgccttgggcagccacaagctttaagagcgcagcggttttatagctcgactaaccagacaattgcagcctgtcgttgctcggcatggctcgtcagcgtgtgaaaggaaggtttcaaatgcacaactacaagatgctcatcgatggggttcaagtggccggtgaacgaggccagtttgacgtggtcaacccggccaccggcgctgcatttgcacaatgcccggcaggctcgctggggcaactcgaccaggcggtgaatgccgcgcaggcggctttcaaaagctggcgccacagtagccacccagaccgttgtgaacgtttgctggcgattgccgccgatatcgagcgcgaggccgacgcgctggcccgcctgattgtgcaggagcaaggcaagccgctggagctggcgtttggcgaggtcatgggggccgcggcgtggacccgctacgcggcggctcaagacattgcggtggagctggtggaagaaacccccacccaacgcatcgagctgcaccgcaaaccgttgggcgtcgtggcgtcgatcaccccctggaactggccgttcatgatcgccgtctggcacatcatgccggcgctgcgtgccggcaactgtgtgatcagcaaaccgtcgagcctgaccccgttaagcacgttgggcctggttgaaatcattgcccgccacgtgccccgcggggtgatcaactgcgtgacgggcgagcagggcttcggcagcgcaatcaccgcgcataccggcatccagaaaattgtcttcaccggttccaccagcaccgggcaaagcgtgatgcggggggccgccagcaacctcaagcgcctgaccctggaattgggtggtaacgatgcggcaattgtattgccaggaacgccggtcgaggcagtggccgaagagatcttccaggccgcctttctcaacatgggccagacctgtgcggccctcaagcgcttgtacatccacgaatcacagtaccaggcctttgccgacgcgctgacgcagatcgcagcgcgccaggtggtgggggatggtctcgacgccggtgtcacgttcgggccggtgcagaacctggagcaactggaactggtggaggccttggtcgccgacgcacgcgccaacggcgcacgggtgctgtgtggcggggcgcgcctggatcacccgggttttttctatccccctacgctggtggcggacgtcaccgatggccatcgcctggtcgatgaggaacagttcggccctgtgttgcccttgattgcctaccgggatgtcgaagatgtgctgcagcgcgccaacgctggtgacatggggctcggtggctcggtctgggggccggatgtcgagcaggcccaggccttggccagtcgcctggagagcggcgttgcctgggtcaactgccatgcgcagatccagcccaatacgccgtttggtggcagcaaaatgtcggggtttggtgtcgagttcggccttgaagggttactggaattcacaggccagcaattgctgttcgtgcgcaagcgcgatcccgcccaaggagcttgaacatgtacgaaaaatacaagaccgccgagaaaaagttctggcaccccatggggtccagtgccccggcgcagcgcgccaaaacgctgatcatcgcccgaggtgacggcaattacattacggacatcgacggccagcgcatgctcgacggcgtgggcggcctgtggaatgtgaacattgggcacaaccgtgccagcgtcaaggcagcgattgccgcgcagttggatgaattggcgtattaccagaccttcgacggcattgcccaccctcgggtgttcgacctggcagaacggctgaccaccctgttcgcccaggaacgcatgacacgggtgctgttcagttccggtggctccgatgcggtcgaaaccgcgctgaaaatggcccgccaatactggatcgccagtggcgaaccggggcgcacgcggtttctgtcgctgcgtaacggctatcacggtgtgcatatgggcggcacatcggtgggcggtaacggtgtctaccactacaaccatgggcagctgttggccggctgccatttgctcgacaccccatggctgtatcgcaacccctgggattgccgtgatcccgaagcgctgacggcgcactgtattcggcaattggaggagcagatcgcgttgctgggcgcgcagacggttgccgcattgatcgccgagccggtgcaaggtgccggcggggtgatcgtaccgcccgccagttactggccgcgcctgcgggaggtgtgtgaccgccacggtattgtgttaatcgccgacgaagtggtcacggggttcggccgttccggctgcatgctcggcagtcgtggctggggcgtcgcgccggacatcctgtgcctggccaaaggcatcacggccgggtacatcccgctgggcgccacgctgttcaaccaacgcatcgtcgacgccatcgagaacgggcctggcttcagcagcatggtcatgcacggctacacatacagcggccacccgaccgcctgtgcggccgcgctggcggtactggacatcgtcgaagccgaggacctgccgggcaacgcggccagagtgggtgcgtacttgctggaacagctcaaaccgttgaccgagcgctacccggtgatcggcgaagtgcgtggcaagggcctgatgatcgcgctggacctggtggtcgataaggccacgcgccaccccctcgacccggctggcggccaaccctcgcggatcgccgacgaggcgcggcgtgccggtgtgctggtgcgaccgatcggcaacaagatcattctctcgccgccattgaccctcaccaccgatgaggcggacttgatcgtctctgcgctggatatcgccttcaccagctacggctagtcgccgttaaaacggtgcggcaaaggctgcacccacgtcatgccaatacttaagacagccttttgaaaggcgcacctccaggagcttgagccatgcggtatccattgcgtcgtcccgtgttcggtagcacgttcgtgtgcacattggcgctgtgcgccattcaacaggcccaggcctatgaggtgtacagcgacgacagccggcacctcaacgcggacatgaccgcggtattcggtcagttcaacagccgcaagaactacgatggcacctcgggcggctccacatggcgcgagggttatatcaaatacggcctgagcggtgaccaggccttgggcggcaatggctccgcgtatggggcattcgcgctggtcagctccgccacctggggcgacggtgatccgggcggaaacagcgtggggacagagcgtacgactaaaatcgaagacgcctacctggggtggcgctccggcgatctgtttccggcgttgggcaaggacggcgtggatatctccggcgggcgtcaggtggtcaaggtcggtcgcggcttcctgatcaacgatgacggactgaacctgggcaaaggcccggccgatggcaccatgaaccgtgggggcgcttactacctggctgcccggcatgcattcgaccaaaccgccgtgctgcgcctgggtgggcaagagggcctgcacggcagcgtgctgtggctcaagtccgacaaccgcgtccaggccgaaaccgaactggccgccggcaccctggattacaccgcgcaaccgggcacgcttgggctgacctgggtgcatggcctcgacgtgaacgatcgatgggccagcgactttcagcgccagcgcaagggcatgaatatctacagcctgcgcgcagagggcgatgcgggcgtcaagaacctcagcctggcgtttgaatacgcctggcaggacaaggacgccgggccggagaaagcctggtacggcgaagcgggctacacctttgccgataccgcctgggcacccaaggtgacctatcgctatacgcgttactcgcaaaactgggatgcgctgttcaccggcttgagcatgggctatggcacctggttccagggcgaagtggccggtaactacgccgggccgttcaacagcaatacgcgtatccatcacgtcgggctgaaggcaaccccactggaaaacctgaccctgggcgcgctgtatttcgattacgacaccgtgcgtaaaagcacggcgttgaacctcgatgcccgcgagctggatgtgtacgccgagtgggtggtcaacccgcacttgatcatcaccccgctggtggggctctacaaacccaagcaggactcgaccaccggtggcaaccaggtcggcggcaacggcaccaacctgtacagccaattgacggtggccgtgccgttctgaagggcgcgggctagggcgcgataccgctcggcgcgttatgcatgttttcggcaatgcgccgggtggtgtccatcaccatttcaatcacggtttcctggcgcagcagcttgaagctttgggtgctgccgacggccgacaggctgccgaccacttcgtcgaggtccgtctggatgatcggtgcggcgataccggtcaggcccaggttgagttcgtcgtgggtcaggcagtaaccgtccttgcggatctttttcgcggccttgctgaaaccggcccagtcatagggactgtcggggtcgctggccatgtgttcgtcgaacaggcgttgcaggcggcgacctttctgataggcgatcaaaaccttcgattgtgccccgcgaaagaacggcaacggctgcccacgcccgaacgcgaagtgataggtgtcggcgggttcggcgatgtaggtgttgatgatgcgcccgtcgtaaaacacgctggcgaacaccgccaggccggtttgcgcggacagctcgtgcatcagctcgcgcccggcgagcaggatcgggtcgtactggcgcattttccagtccagctcgatcacccgcgggcccaggccatagctgccggcatccacgcgggtcaacaggccggcatcgcacaggtccttgacgtagcggtacacggtggcccgtgacaggcccatgcgctcggcgatggtgtcggggtcgatcttcaacgtctgtgggccgaacaggtccaggacgctcagcaatttgctcaggctgctcatttcgttcctaaaaggggggcacgtgctgcattccgtgggcgcaacactaccgcagtgaaagaaaaacgcaatcttttgtgctttttagatcatcaaaaaatcacataaatctcattaaatgagacaaatcaaaataaaatgcttgttgattggatttttgtgtgtgataaatctcatcactgcaaacgctcaagcaagagggctgaaaatgaatggtgcgcaactgatagtgaatgcggcagcggcaagcggtatcgagtactgcttcgccaaccccgggaccaccgagattcccctggtggcggccatggccagcgcacccgctctcaagccggtgttgtcgctgttcgaaggggtctgcaccggcgcggccgatggctatggccggattgccggcaaaccggccatgaccctgacccacttggggcctgggttcgccaacggcatcgccaacctgcacaacgcacgccgtgccaacacccccatcgtcaacgtgatcggcgaccacgcctcctggcacgtcaactacgacccgccgctggccagtgacatccaggccctggccggcgcggtttccggctgggtgcgcacctcgcgcaccgcgtcgggggttggcgaagacctgcaggaagccatgcgcgcggcctggcaggccaaagggcagatcgccagtttgatcctgcccatggacctgcaagcccacgccgtgacccacaacggtgtgttcgccccgatccgcccgccggtgcgccgctttgccggtgaccgcatcgagagcgtggccagggccctgcgtgacggcctgcgcctggtgtttatcgtcggtgacgaaggcttgtcggtggccggcctggaagcggcggggcgcctggcgcaactgccgggcgtgcgtctgttcgccgagacctttccacgcctcagctaccgtggcggtggcctgccggacctggaccgcctgccgtacttcccggaagtggcgattgaaatcctcgaacaatacgacctggtggtgtgcgccggcgtgccggagcccatcagctacttcggctacgaaggcatcccgtcgcgcctggccgaacgtgagcgcctgctggcgttggccgatgtcggtgacgatgtcgccggcgcgctgacggcattggccgacgccctcgatgcgccggcctatataccgacgccccagggtatcgaactgccgcccggccatgccgagctgaccccacagtcggtgggccaggtgctggccgcctccctgccggacgacagcattgtctccgtggagggcggcacctgcggctatccgttcttcaccgcttcggcccgcgccgcacggcatcgggtactgaccaataccggcggcgcgattggccagggtatcccggtcggcttcggcgccgccctggccgagcgcggcaaccgtgtgtactgcctgcaatcggacggcagcgcccaatacaccattcaaaccctgtggagcattgcccgcgagcaattgccggtggtgatcctgattgccgccaaccaccgctacgcgattctgcagaacgagttgcgccgcttcggcatgaccgaactgggccctgaagccctgaagctgacggtgctcgacagcccgcgcatcgactggaaagccctggccaaaggctacggcgtaccggccagcacggtgcacaccaatgccgaactgcaacgggcgctggccaatgcgaatgccgacggcgggccttgcctgatcgaaatggcgctgtgaaggagtcgaccatgaagctgtttgaagtgttacccgccgtccaggcctttctgtcccagccgggtcgcctgtttatcggtggcagttggcaggacgccgccgatggccgccgcttcgcggtggaaaacccggccaccgaagaaaccctgaccgaagtggcccagggcggtgcgcgggatgtggacgcggccgttgccgctgcgcgctcggcgttcaacggcgcctggtcgttgcagtcaccggcccagcgcggcctgttgctgttccgcctggcggacctgttggaccagcaccgcgaagaactggcgcagctgatcaccctggagaacggcaagccgattgccgcagcgcgcggtgaagcggccagcgccgcgaccatcctgcgttactttgccggctggccgaccaagatcgaaggcagcaccttgccggtgtcaccggccagcggcgcgccgatgctcaactacaccctgcgtgaaccggtgggggtctgcgcgctgatcgtgccgtggaatttcccgctgaacatgtgcgtgtggaagctcggcccggcactggccaccggttgcgtggcagtgctcaagccggccgaacaaacgccgctggtcgcgatccgcctggtgcagttgatcgaggcggcggggttcccggccggcgtggtcaacctggtcactggcctgggcgccgaaaccggcgcgccgctggcggagcatcccgatgtggacaagatcgcctttaccggctcgacccaggtcggccggctgatcgcgcaagcggccacgcgcaacatgaaaaaggtctcgctggaactgggcggcaagtcgccgaacatcatcctgcccgacgccgatatcgtgcgcgccgccaaaggcgccgccgatggcattttctataaccagggccaggtgtgcacggccgcttcgcggttgtacgtgcacgccagcgtgctggatcaggtccttgaggaactcgaacggcacgccgccgcccacgtcctcggcaatggcctggacccggccagcagcatgggcccgctggtgtccgggcgccaactggcgacggtcaagggctacctgcaacgcggccaggaagaaggcgccgaactgatctgcggtggcgggcgtccggaacacctggagcgcggccactttattgcgcccagcgtgttcctggatcgcgccgaggcggcctgcgtggcccgcgaagaaatcttcggcccggtactgacggtgatgagctggaccgaaatcgacgacctggtcttgcgcgccaacgattcgccctacggcctcgcggccggcctgtggacccgcgacctgcgctcggcgcaccgcgtggcggcgcagctcaaggcaggctcggtgtgggtcaactgctggaacgtggtcgatgcggcctcgccattcggcggctacaagcaatccggctggggccgggaaatgggtaagaacgtgatcgatgcctacaccgagaccaaaagcgtgtttgtcgatctggcctgaactgaataatcacacgaggtaattgttatggatcttgaattgaaaggccgcgtggccattgtcaccggtggcggcatggggatcggcaaggaagtcgcacgttttctctccgaagaaggctgcaaggtggtgatctgcgcgcgccgcatggcgttcctgcaactggccgccgaagagatcagcgcccagaccggcaacgaagtgctgccgctgttctgcgacaccaatgacatgtccgccgtgtcggaaatggtcgaagccgcctacaagcacttcggccgcatcgacatcctggtcaacggtgccgctgcgccgtccggcgtcgtgcgcaacgacatcgagcacgctggcgacgatgagctgctgtcggacctcaacaccaaggtgatcggctacttccgttgcgccaaggccgtgaccccgcacatgaaggccgctggcttcggtcgcatcatcaacatcggtggcctcaccggacgcagcagcaaggtgctgtcgggcatgcgcaacctggccatcgcgcacatgaccaagaccttgtccgaccagctcggcccgtcgggcatcacggtcaacctgattcaccctggcgtggtggataccccgcatatccaggagctgtatgaccgtgaagcggtcaagcaaggcaagaccgcggaacaggtcgagcaggcctacatcgacgcgacgccgattcgccgcaccctggcaccgattgaaatgggctggttgattggtttcctggcgtcgcccaaggccggcgcggtgaccggcgagtccatcggcatcgacggcggtttgacccgtggtatctatatctgaggagtatctgtgatgagtaacggaacccttttggttgccaccgtcgggcaagcggtgatccgcagtgccgacgatggccgtacctggcatcgcctgggcctggggcaggacctggaattcgatgcaatcactcgctcactgagcctgcaccccgacgcgcccgaggtgatttacgccggtaccgacgtgggcttgtgcgtcagccgcgacaccggcggccattggcagcgcgtcgattcgccgttcaacgggcagaccgtgtggaaagtcgcggtggacccacgcaacgcacaacggattttcgtcggcaccggggcaccgtcccgcgccgtgttgtggcgcaccctggacggtgggctgagctgggatcgcgcaccggtggagattccggagttctgcgacggcgtcagtcgcccacgcctgctggcgtttgcctacgacccggtcgaccccgaccagttgtggttcggccttgaagagggtgggttgttccactcccgcgacggcggcgacagctggacccgcgtcgatgaccgcctgttgtgggagttcaactcggacgtgcacaacatcctggtgctgcccaaccatggccagaaagtcatcgtggtggtctgcgtcaacgcggtctaccgcagcctggacgaaggcctgacctggaccggcatcatcggccgcgaagccttcggcctgtattacatccgcgccatgaacgcgccgttgggcacgcaaagcgacctttacctgagcatttccgatggcacgccgggcaccaccagcaagatcctggtgtcccgcgatgcggcgctcagctgggaagtgctgccgctttcccagcagcccaattcctgtgtgtgggcgattgccttcaacccggccaacccacggcagatcgtggcgggcaccaagtacgggcacctgttcacctccgacaacggcggtgacggctggcagaaacagtggcgcgacttcagcgagatcgctgacgtgctgtggacgccggctgtggcgcagatcaaggccgggcatcaatccatcgtcaagaagcactgaggtatatcgccatgaaagtcgagatcctgcgtactcacctatcgctctgggtcgctgacccggacgtgtcggcccgctggtacgccgacatcctgggcatgcacgaaagtgcccggggcgagagctgggtcatgatggcgtttggcggcaagcaccacgacattgccttgatccgcgccgaccccggcgcccatcagggcgggctggggctgcaacactacggcctggaaatcgacggggacatgaccaccctgcgccagctctacggcatgttgctgggcaagggcgtcgaggtggtgaagatcaccgatcacgaaatcggccatggcgtgtacttcaacgaccccgacggcaaccgcatggaattcttcctcgagaccgaacacgacgatgcgcgcggcaaggcccggttcaaggccgctggcgcgccgagccgacatttcaacctggacccactggacccactttgaggcaaaccccgatgaaaaccgctaattttgcgacctatcacatccgtaaatggtacagcttcgtcgaagaaaccctggccaacgaaaccggccagctggccgatggcgagccactgttcaaatatgcaattgccgccgtgatcgccaacccttatgccggtcgctacagcgagtcgctggccgaactggtcgacccttcgccgctgctgggcgaagaatttggccggcgcatccaggcactggccggtgcccatgagattgtcagctatggcaaggcgatcctggtgggcagcgagggcgaatacgagcacgggaatgcattcctgaccaacccggccgccgatccgatccgtgttgcgctgggcggcggcaagtcctgggtaccgtccaccggcaagcgcggcgggccgggttcgaccatcgatgtaccgctggcgcacaaggatgccctgtatgtacgttcccattacgacagcatgtcgctgatgtttggcgacgggcctgcgcccgacgaggtcgtgatcatctgggcctttgccacccgtgggcgcttgcatgcacgcctgggtggcttgcaggctgaggacgtgaaagggctggatgggctgcactgaggcgcatggctttggcgacgccggattaaaaccacaacaagaagcggtgaatagcgatgaagcaggagaagacccaggttgtcattgtcggcggcgggcccaacgggatcacggccgcacactatatggggatgtacggaatcgactgcgtcgtccttgaactggctgattgcatcctgccttacccgcgtgcggtgggcatggatgatgaagccctgcgcgtgttgcagggtatcggcatcgccgagctggccgtgcgcgatatgatctgcgacgtgccgttgcgctactacaacgcacgcggtgtgtgtttcgccgaggtcaagccgagcaccgcctactacggctggccgatgcgcaatatcttcatgcagcagttgcttgaaggcaccctgcgcgaaaacctggggcagcgtacctgtgtggagttgcgccagggccatgaaatgctcgaactggagcaggacggcgagggtgtgaccctgcaggtgcgcaatgcccagggcgaggtctatgagctgcgcgccgactatgtgatcggcgccgatggcgggcgctccaccgtacgcaaaaaggtcggcgttgaattgctggggctgacccatccgcgcaaatgggtggtggtcgacaccgccaatgacaccctggatgcaccctataccgcactgcatgccgacccgcagcgcccgttcgtgtgcatctacctgccttaccagcagcggcgttgggagttcatgctgatggaaggcgaagatgaggcgaagatgtgcgaagaaagcaccatccgtgacctgatccgtgggcatatcggcgacgccgtcgaccagttgaacatcatccgcatccgcgcctacacccaccactcccgggtagcggcacgctttgtccaagggcgtgtggcgctggtgggggatgccgcacatatctcgccaccctgggccgggcagggcctcaattcaggtttgcgcgacgtggccaacgtggtctggaaactcgcggcaatcatccaggggcgtgcgtcccatgggattctcgcaagctacgaccaggagcgccgtgggcatgccaccgagctggtggccctggccgacaatatgggcaccgtattgggcttgaccaacccgttgatggccggcgtgcgcgactggttgttccaggcagtgaacagcgtcgacaacctgcgctcgcacctgctggagttcaagttcaaacccaaggccaccatcgccaaaggcctggtctatcacgaacgtgccgaactgcgtgaggacgacctggtcggccagctgtttgtgcagccctatatcgaagacgccaagggtcagcgtcggcgcctggatgacgtgttggggcattcctatgcggtgctgggttaccgggtcaacccgcgcgagcaactcagtgaaaagatggcgacattctgggcgcgctgggacacacgcttcatccaggtcaatcgttcgcgcagcggcttgggccgtcaccagccgttgacggcgatggacgccatcagcgtggaggacgtggataatcgcctcggcgaatggttctccaaggtgcgcgattgcatcgtcgtggtgcgcccggaccggtttgtcgcggccattaccacgcccgagcggctggaaagtgtgttgcgcaagttggcggagcaactgtcatgagcgctgacaaccccgtgttgaaccagttgcaccacgccacgcgcacggtgcaggccatcgcgccgctggcatctgacgcgctggacctgcactcagggtacgcgctgcaacgccaggcgctggacctgcgcctggcggcgggcgaacatctgagcggctggaagatcgccttcgccggcagcgccgcgcaaaggcgtttcggcctggaggagcccgtgtatggcggcctgactgaccgcatgcgtgtgctgccgaacacggcagtggcgctttcgcggttgatccagcccaagctggagatcgaagtggcaatcgtgctgggccgcagcctcgcaccgggtgactaccgtgatgaggagatcctggcggccattgcagaggtggcgccggcgttcgagattgccgattgccgttggcagggctggacgttcggggcgggggcttttcttgccgataacgcggcggcggggctgtattgcctcgggccgttgatggctttcgatcccattgcgcatgccaacgtcgcctatcgcctggaaagtgctggcgcgcttcgcggcgaaggcaacaccgagggccgggaggatccaccactggccaacctgtgctggctgattcgccgtctgttggctgacggccaaccggtggaggccgggcaagtggtgctgtccggtgcgctcttggcgccgatggatatccagcccgctacgtaccgcttgcatatgtttggcacggaactggctttgcttttcacggcggacaccgctcctgtgtgaacgccagctgccgtcatggatgacttgagtccccttcaggccgataacaacaacggggcacctaggaacgacgaccatgcttgctgaagttcgaaccttcaatgaccctcaattgcacgccggttccatccagggctggcggcaggtctatgaccagttgggccgtggctgcctgaccagcgagctatggcaattgtccgccgaccgctttcagatcttccaggaagtgttggacaaacgcgtggtgcagcgcggctatgcgcccaaagaccggctgtgcgcggccatgtcattgggcagtgcgcctgtggtgcagggtcagcaagtgggggcgcacagcgtcgtgctgttgcgcgatggcgaggagtttgtactgcatgcgcctgaaggtacgcacttcttcgccctcaacgtcgatacggtacgcttcgccaaactggccgccttcgagttgtccggcgatcagctcaagcgcctcaccacccgctcccaactctgtgtggatgacgcgttactgttgcgcatacgccagcggatctacccgctgtttcgtcaccttttgcaacaaaccgatgcgatcagcgcaaccgccgagaaaatgcttgaggacgaactgctcaacgcgttcctcgatttgttcagcaacgccaccgacgaggtgcgttgccgtcgcggcaattttgccgtgagtgcttacctggtcaagcgttgccaggagttgatcgatgccagtggcgataccccactgagtattctcgatctgtgtgaacacctgcgcgtcagccggcggaccctgcagaacagcttccaggcggtgaccggcatgcgtccggtggagtacctgcgaaacctgcgtctgaatgcggtgcgtcgacgcctgatcgccaccccggcctgcacccagaacgtcggcgaggtggcggtggcgatgggcttcttccacctgagccactttgcagcgcattaccgggcgctgtttggcgagtcgccgtctgaaacacgtcgagcgatggtctgagtctccggggttcaggcgacggggttgcccataccctccacaggtaagccttcctccagacagttgtccgggcgctcatgcaatcgctggttgcaccacgcgaagcctggcaccaccaccctgcacagcgccagtggcacaagacacgccaggccgacccgcggcctgatcgccacgtgggtacgtgtctctcgaagaaatcaacgagctttgatggaggaaccctggagacccggggtttatctgtgtagctcgcgatcaggcgtagctgatcctgtcggtgtaggcgttttgcagcattttgcgttggtagtcgcagggtgtggtactgaccagttttttgaagtcgcgcaggaagtgggattgatcggaaaagcccaggtccagggccagctgcgaaaacgaaacatcctgctgggtattgagggtgtccagggccgcctggcagcggatgatccggcaaaacgtcttgggtgacatgccggtgtcctgattgaactggcggtgcaaggtacggctggtatagccactgagatcttcgagttgctggatgcgaatatcgccgcgatggcgcagcgcctgctgaatgatcatggcggtgagtcccgatgtcttgcccatcaggcgtggggccaggtagtcgttgaacagccgcatctggtcgcccagcagcggtgcctggacgatgctttcgaagatgcgatgggcgaaccccgagacctccagcaggtcgagttcccgctcggtcagctcttcggccagcacattgatgaagccgggaatgacacccggtgaaaagcgcacgccgaagtagtgatggtgctgatgcaaatggacggcttgggcggtcagcggtgtgccacagatcctggcgctgggtcgagtggcatcgcagtcgaaaacgatgtccacgcagccatccggcacggccagcaggtcgctcgattgggcgacgtcgaaggcatagaaatgcgagatcgccgggtgcgcggagggcatcaccgaatagcgtgaagaattgagcacgaaccaaggctgttcgttcgcggtgtggtgccggggagtcggcacattcggtttgatcatggttgcaccttgggtaggcagcgctgcgggaaaaatcacgcattaatcgcgccaactgacgctgcgccggcctgagggcatgtccgaaatttacaataccgtcgacaacgtccgcccgatactcgacctcgacagcgtggagctgcgcctaccgcagcgatgtcaccttcagcgcgagaataactatgtctacaaatacaaaaatcgacttcatctacctctccgagcaggacatgatccgcgcgggggtgaccgacatgctggcctgcgtgaataccatggaagagatgttcggcctgctgtacgccggtgactaccgcatggccggcccgaacaacgactcccatggggcgatggtggtttttccgcaggattcgccgttcccgaatatgcccaagcccacggctgatcgacgcatgatggccatgccggcctacctgggcggcagcttttgcaccgccggcgtgaagtggtacggctccaatatcgccaaccgcgaaaagggcctgccgcgctccatcctgatgttcaccctgaatgaccccgacactggcgcgccgttggcgcatatgtcggccaacctgctgtctgcctaccgcaccggtgcgattcccggtgtaggcgcgcgccacctggcccgcaaagactcgaaagtcgtcggtctgcttggccccggtgtcatgggcaagaccacgctggcggcatttatcgcggtgtgtccgcacatcgacacactgaagatcaagggccgtggccagaagagcctcgacaattttatcgcgtgggtcacagcgacttatccgcagatcaccacgattgaggtggtcgacacccttgaggcagtcgtccgcgattcggaccttgttacttattgtagctccggtgaggtgggcgacccctcgatctacccaattgtgcgacgtgaatgggtcaagccaggcgccttcctcgcgatgccggcgtcctgctcgctcgacgcgggtatggaacagcccgacgtgcgcaaggtgctggacaacactggtctctaccaggcctggtttgaagagttacccaagcctgcgcatcacaccgtgcccgtcattggcgtgcgcttcatggacatgattgccgaaggcaagatgcagctcgatgacgtcgaggacatcggcaagatcatcgccggtgccgcgccagggcgtagaagcgatgatgaaatcatcatcatgtcggtgggcggtatgcccgtggaggacgtggcctggggcacggtgatttaccgcaacgcgatcaagcaaggcatcggtgtgaccttgaacctgtgggaaaccccggaactgcgctgagccaccccaacactttcctttgcgaggcattcgacatgacaaaaatcatcaagctcaagaccggttcgccgtttgaagatcaggccagctattcgcgcctggtggtcgtggataactggatctacgtgtccaacacggcgggccgcaacccgcagaccaagctgattccggaagacgtccttgagcagacgcaccaggtcttcgccaatatcgagtcggccctcaaggccgtcgatgcgagcctggccgatgtggtgtgttcgcgggtgttcatccaggaccccaaggacgtgcccgcggtcatgggcctgatcggcgaaaagtttcgcggcgtcgacccggcgagcaccgtcacctgtccacccctgggctcgacggtctacaaggtggagctggaagtgaccgcgtatcgcaacgcgtcgaaggcgcaggtcgaagtcattcgcctgtcgcaatgatcgtcaagcggccaggcgcaggcgtggccgcccttattcgcttaccgagtcttgaccatggcaccgacaatagcgcccgtgacaacctccaccgtatttcccagcgccacgtccgtcgtcatcattggtggcgggatcatcggcctgacggctgcgctgaccctggctgagcgcaacatcgcggtggtggtcctggaaaaaggccgtatcgccgccgagcagtcatcacgcaacctgggctgggtacgcaagaccagccgccacgccgccgacatcccgctggcgcttgcggctgaccggctgtgggcacaaatgcccgagcgggtcggggcggatgtcgggtatcgccaggaaggcattatgtttctgggccgcacacctgcgcagatggcgatgcacgaggggtggctcaagtcggtggagcatttgtcgctggattcgcggctgctcagcaagcgtgagattgacgcgatggtgccaggcggcgtgggtgattgggccggcggcatcttcaccgcgtccgacgcgcgtgccgaaccgacgctggccagcagtgcgattgccaaggcggccatggccatgggcgtggtgattatcgagcaatgcgcggtgcgcacgctgcagatgtctgccggcgcagtcagtggcgtggtcacggaaaaaggcgaaatcagctgcgaccatgtgttgctggcgggggggatgtggtcacggcgttttctgggcaacctcggtgtgtcattgccgaccttgcccttgacctgctcggtgctgcgcacccaccccatggaggggccgacgcagatcgctgtcggtgcgcctgatttttcctttcgcaagcacaaggacggcggtttcatcattacccagcgcggtaagttggacgccttcctgaccctcgatcacttgttgctcgccaagcaatatatgccgcagttccgtgcgcaacgcagcgtcttgaacgtgtcgctgggcaagccatttatcaatgacctggcactggctcggcggtggggcgccgatagcgtcagcccgttcgagcgtgtcagggtgcaggatccagccgccaacccgcggctcaataacgacgcgatgaacaacctcatggcggcctggcctgtgtttgagcaggcgcggatcgcccaggcctgggctggcactatcgacgtgacacccgattccaacccggtcatcggcccggtcgcgcagattccggggctgaccgtggccaccggcttctcggggcatggcttcggcacgtcgccagcggcgggccatctcgcggcggacctggtcagtgggcatacgccgatcattgacccaagcccttatcgcttcgatcgtttctaaaggagcatgcccatgcctgccgacagctgttttttcactaaccgtgccggcctgcgcctgcacttcttgcgctggggcgattcgagcggcgtgcccctggtgctgttgcacggcttgcgggcctatgcacagacctgggagtcgctggtgcaagccttgggcgcgggctactgcatttacgctctggatcagcgtggccgggggttgagtgactgggctgcgcccgccagctaccacactcaatcgtatgtcgaagacctcgaagatttggtcgcccacgtgggcctgcagcgatttgtgttgctcgggcactcattgggcggcgccaacgcccttgaatatgcgcggcaacacccgggccgtttgctcggtttgctgattgaagacatcggccccggctcttcaagccagggcgatggcgccgcgcgtattcgtcgcgagatgggccagacaccgttgcagttcgagagctgggaggtggcccgcgcattctggcaggctgcgcgtccgggcttgtcgcaagagggcctggcatcgaggctcgcgcattcgatgcaagagcgcgacggcgcgatcacctggcgtcacgatcagcaggggattgccgaggcgcgcctgagcatcgaaccgacggatttgtggccggcggtgcgcgcactggattgcccgagcctgttcattcgcggcgcacgctcggatttcctgccgcctgcgacactgcacgcaatgactgcctgcaatccgcaggtgcgcacggtggaggtcgccgacgccagtcactatgtgcacgacgatcaaggggcggtgttcaatgccctggtggcggagtttcttgaaagccttgcgcgcccggaatgaagcccacagcccgcatgattgcgttattggcctcgctgacggcctttgtgccgttttccattgatacctacttgcccagcctgccgcagattgccgttgagctgtcgagcagcacggcgcgagtgcaacacacgatcagcgcgttcctcgccggcttatgcctgggcatgttgttctacggcccgctgtcggaccgctatggacgtcgcgcgttattgttgggcagcctcacgctgtatggcctggcaactttggggtgcctgtttgccgcaagcatcgatcaactgatcgcctggcgctttatccaggcgctgggcggggccggcgcaatggtgctggccaggaccgtggccagggatttgttcggtctggcgcaggccgccaaagtgttgtcctggatgcaaatgctgacaatgatggcgacgttggttgcgcccatggtcggcacctggctggtgctggtcgacggttggcgcaccatattcgccgtgttgttcatcctgtgcgggttttgtctgctgatggtcggtgtggggttggacgaaagcctgccgccgctggcgcgcggccactcgctcaaggccgcctttgcggcctacccgggtattctccgccagcctcgggcggtcgcgttgatcctgtgcatgtccctcacgtttggcggcgtgttcgcctttatcaccgcctcaccctttgtgtacgtggagtacttcggtgtctcgccgcgcctgttcagtgcgctgtttggcctgaacattctgggcatcatcgtcgtgagctttatcaatgcccgctgggtcacgcgcctggggccactgcgcatgctgggcgtaggaaccgcgctggcaggcatcgccgcaatagcgttgttggtggcgggttacacccaatggggcgggctgaccagcatcgtactgtgcctgatgctgtacatgggggtgacgggcttgctgggggccaactgcacggcgagcctgatgagcatgttcccgaggcaagcgggggcgagcgtcgccctcggggtctcgatgcagtttgcctgtggggcgctggcgagtctgtgggtcagtcgcctggcggatggcaccccatggcccatgtgcctggtggtgggctgttgcgggctgggctgcctggtggcgtatgccattgcgcggcgcgcgccgttcacgcctgtggttgtgcgggatgaacagcctgtgccgtttcaaccctgaggcggcgacaagcacgcggagactgctggtaatttgcttgagcttgccagccacttggagatgcctgacagcacagggtgaatcctcgcgctaaggctctcccagattattgaacaccgtttccagcatgcggttgaggcgctggatctgggcttcggtcatgccactgaaactgcgcttgaacacgtcgccggtggcggcctggatgcgttcgatggcggcccggccctcggccgtgatgcgtacctgggtaacccgtccatcgtcctcgcagggcgcggtgtcgaccaggccatcgtccttcatgcggtacaccgttttggtgatggtcgacagcttggcgatggcgtgggtggagatctcggaaatactggattggccgttttccttgaggatgaacagcacgcgccagcgggggatatccaggccgatttttttcagggatttttccatgtattggctatagcggccatgcaccatcgccagccagtagaacggaaaatcttctttgtgaaagtcttcactgccggggtcgtagcgactggcgtgtgttttcggagacgtcatggtcagctcatgtcggaagaggcaagcaatcatagacttttctcgtgaattcggcacggttatcaccggctgaaacgcaagccatgacgtcggggcacgtgaatggatttaattgacaattcacgtaatagtcagggagtgtgaaaaaagacagccggcgtttcaggcttcgttcactgagttttacagcgaaggaaaacgtgacatgaccatcgtgattgaacagctttctcttggcggcaacgggtttagcgtgatggtgaaagacaccatcgatgtcgccggcagggtgactcgggcgtcgagtcaggcgcttgatgacgcggcacccgccgacacccatgccgatgtggtgcaggccctgttggacaagggctgtcacttggtgggcaagaccagtctgcatgaactggcgttcggcaccaccggtatcaaccattggacgggtacggcgccgaacccgcgttttcctgggcgtatccctggggggtcttccagcggttcggcagcggccgtggccgctgggttggcggactttaccctcggcaccgataccggtggttcggtgcgtgtcccggcgtgttgttgtggggtgttcggcttcaaaccgacgttcggccgtgtcagccgtcgaggcgtgatgcctgcgcaaagcagtctcgattgtgtcgggccatttgcggccagcctgccgatgctgatcaaggccatgcaggtcattgaccccaccttccatccggtgcctctgcagcagccaccacggctcggcatcctggcggtccaggcaagtgctgcggtgcaacgtgtgatcgatgccgccgtggcagacagtggtttgccgactcaacccgtgaccctgccgagcctcgatgcggcctatgctgccggcatggtggtcatcaatcgtgaaacgttcgacgcctgtgggcacttgttggcgaccggtctggtgggggccgatatcgccagtcgcctggccgctgccggcaccaccacggcacagggcctggtgcatgccgaagaggtgcgcgaacagttcacggccgaagtcgacgcggcgttgcgtcaagtcgacgtactggcgttgccgaccatgccggatttcccgttgaggctcgccgatgccgccgacacgcaagccgtcctgggcatgacccggttggtgcggcccttcaatctgagcgggcacccggcgttgagcattcccctgggcagcgccgagggcctgccggttgggttgcaactggtgggggtgaaaggcgcggacgaacaactgctggctatcgccggccacctgctcgaatgcctgtattccaaccataagggctgatcggctcaggaggtgaacatgcatgaaccacacgctttggcaacgcttgaaagacgcttgcgccggttcgaaacccaagacagcgtgcgtgcctgcatgaaccgctacatggtgttgtgtgacgggttggatgcgcactcgccgttgccagagttggccggcctgttcacccaggacgcggtgtgggagggcaagggcgccaaatacgccaagagtttcggcggctatcgcgggcgtgaggccattgccgcgatgttctcgggctacatgaagtcacccgcgcactttgccctcaatgtgcattttctgaccagtgagctgatcgaggtgcacgatgatcacgtcatgggcagttgggtgatgttgcagacgtcgacatttgccagtggcgcctcccacctcaatgccgctcggctgacggtacggtttgccttggaggagggcgtgtggcgcatggcgcacttccagaccgaaaacctgttcgggcgccctgtgcaggcctggaacagcgaagacgacctgccggtgccccaggctggcgtcgaatgatcgccttgcatcgctgacaccgctcacgtccttttgtcattacccgcccccggtctgccgggggcgtggcgttgccgtgcgcgcagtttatggttggtctattaattttgtgaaaaaaaatattttttccaaagacttctggtttctttatggagagatcagatgctaacaagtccttatataacaataatttgaaaaattaattgagtgtcatttttggaatttaaggcgttttaagcaaaaatattgcgtgaatattcaattgactcttcacgtaaatccgcgcagatttatggcaacggcacccacaaaaataaaggtaaccctatgccgatctatcccgtttgccttgcttgcgtagcgccccttcgcgtcgaaggcacatccgccgcgcccagactccccctccgagatgcccggtttttccggcactgaatcctgcccaagcccataccgttcctgacgacggagtaactatatgcatgcgctaattgcctcagcgaccggggtcgcgagttcgcttgtcggaggtgccgatttcgaggtgttgcttgacgacattcgtgagcgtgcccgatccggtgagttcgaccgccagcggcacatctcacgggacgtgatcgagtccttcaagcagcacggcgtgtaccgggccctggtgcccaaacgctttggcgggctggaatgctcacccgccgaattctgccgggtcatcgaacgtatctcccaggccgatgggtccgccggttgggtcgcgagcttcggcatgagcccggtctacctcgcggcgttacccctcgagagcattgcccaggtgtacgccgatggccctgacctggtctttgccggcggtatcttcccgccgcagccggccgaagtggttgccggtggcttcatggtcaacggtcgctggaagtactccagtgggtcgctgggggcagatattgtcggcgtcggtatcgcacccaaagacggcgataccttcggtttgccgcgtattgccgtgatgccgcgcagcgccattcgcatcgaagaaacctgggataccgtcggcctgttgggaacgggcagtcatgacctggtggccgagcatgtgcgggtcgccgaagagtggaccttcgtgcgcggtggcctgcccaatctcgatgagccgttttttcgttacccgtcactgtcattcgccacccaagtgctctcggtggtcggcctgggtgttgcccgcgccgccctggatgcattgacggacatggcctgcggccgcgtatcggtcaccggcgcgccggcgattgccgatcggccactggctcaagtcgatatcgcccgggcggaagccgacctgcgggcagcccgtgcattcttctacgaatccatcgagcgcgcctgggagtacgtgctggcgggcgatgcagtgccggtggcagccaccaatctgctgcgcctgtcttccacccacgccacacgcgtggccgccgatgttgcccgtaccgcgcaaatgctctcgggcatgagtggtgtgttcaacgacagcccgttggcccgctgcgtcaacgatgcccaggtcgtgacccagcacgccttcatgggcgacatcacctatcagaacgccggagccatgttcttcggtaaacaacccttgcctggctacctctaaccgtcgagaccctgaaaatgaacgataaaaaaatgctccgcgtgctgttctgcatggggatcaaccagaatttcttcgatgcgcctcgtgacgagcaattgcaggtctgggcagccttcagcgcgatgtggaacggcattcacgacctggcgggcgtgcaggtgctcggcaatatggacgacgaccagagcatggtcggcccctccgacggttttccctggaccacttacctgctggccgatgtgccggacatcgataccgtacatgccgcctgcaacctgttccgtagcacgccggtcggcgatggcccgtacaaattgtggcgctacaccaaagtcgaagcccgggttgggcgcgagctgatcatccagcgcacttgatgccgaggaggccatcccatgaacaagctgattcctgccgtgaaccttgccgtcgatcctgccgacctggtgcagtccgatcgcgtgcacacctcgatgtacaccgatgcccagttgttcgacgccgagcttgaaaagattttctacagcacctggatctgggtcgcccatgaaagcgagatccccgacagcggtagctataaaaccacctacatcggcaagcagccggtgattgtggtgcgtgatcgcaagaaagacacccatgtgctgctcaatcgctgccgtcatcgtggcgccaccgtgtgtgaacacaaaaaaggcaagaccaacagtttcgtctgcccgtatcacggttgggggtatgcattggacggctcgctgcgcggcatcccgcatccggaaagctacgccgattgcatcgacaaggccgagctgccgctggtcagcctgcgtaccgaaagctacgccggtatgatcttcgccaccttcaaggatgacatccagccgctggaagactacctcggcgcggcgaagaaatggatggacctgttcatgaagcagggcgcgggatacgggatcaaggtccccggcgaacatcgcttccgttttccgggcaactggaagatccagctggaaaacaccaccgacgcctatcacttcccgctggtgcacaagagcttcctgtcgtcggtggacgagcagaccctggcgttgttcgacttcgtcaaaggccctggttatgtcgaggacttgggcaacgggcacagtgtgatggtgatgattccggacctgatcgacctggaagccgacctggacaatcccatccccgagcgctttgaagcactggccgcggagctgcgtgatgaaggcatcgaggagctgcaggtgcgccgcattgtgcgtgcggtgggcggcaccggtttcaacctcaatctgtttccgaacgtggcctgttcgatggcgtttttccgggtgttgcaaccgctctcggtgaccgagaccgagattcaccactcggtcatcaccatggacggcggcccggccgccgccaaccgctaccgcctgcgcctgcatgagcactttcaaggaccgatggggtttggcacgccggacgattccgaagcctgggagcgtgtgcagaagggcgcaagcgccggcgatgagctgtggatcatgctcaaccgcggcctgcccggcgagcgtgccagtgccgacggccgggtgtccgacgtaagtgccgaaacgggcatgcgcgcggcgtaccaacagtggaaaaagatgatgtcggcctgagccgtggagaaccttatgaatctgcaagtgctgcaagaagtcaccgccttcatctggcaggagggcgacatgctcgaccatggcgagtacgccgcctggttgaagatgtgggcgcccaagggcacctacatcatcccgatcaacccgacggaaaccgacttcgagaacacgctcaactatgcgtacgacgaccaccatatgcgtgagttgcgggtaaaacgcctgatcggtggcgagtcgatctccaccagcccgcagccgcgtacggtgcgcacgcaatcgcgctttcgggtgctgagtgacgacggggtgaacgtgacggtgcgctgcgcacagaacgtgcgtgagttccgcaaggagagcctgaaactctacagcgccgacctgacctacgagttggtgcgggctggaggtggctttgagattcaccgcaaagtggtgagccttatcaacagtgacgatgccctcgccggtatcggctacatcctttgaggcgcgccgacatgaaccagatcgcattggtgactggggcaggccagggcctgggccagcgtttttgcgccagcctgctgcgggccggctattcggtggtcattaccgatatcgagcaggcggccgcagaggcttgccaggcgcaattggaccccggtggcgcgcgcagcctggccctgcccttggacgccggccgcaaggatgacttcgagcgtgccctggccagtgtgctggaacgcttcggtgcgctgcatgtggtggtcaacaacgctgcggtgaccaagaccacgccgttgatgcaaatcagccccgaggagtttgacgccgtggtgggcctgaacctgcgcagcgtattcctggggtgccaggtgctgggcggacacatggctgacgccggttacggacgactcatcaacatggcgtccctggcagggcagaacggcggcaccgcgacgggcgcgcattacgccgccagcaagggcgcgatcatcacgctgaccaaggtattcgccaaagagtttgcctcgcgcggggtgacagtcaacgccatcgcgcctggccccatcgactccgccgccgtgcatgcggctgtgccgcctgagcgcctgccgggcctgctggcaaatatcccggtgcagcgtctgggcgatgcggattttctgggtgacctgatcgtgcagttggcgcggcccgaagcctatttcaccaccggggccacctgggacgtgaatggcggcctgttcatgcgctgactattaccgggtcgccacggcgaccttcacgaactccatggaatcatggccatgactgaacaactgttggatgtagtcgtgcacaagcgcgagctgcaaggggacggcgttgtcgtcctggatttgacccgtcgtgacggtgcaccgctgccgttgttcgaagccggtgcacatgtcgacattcacataaagccgggcctggtgcgccagtactcgctgtgcagcgaccccgccgatcagagcgtctatcggctgggcgtgctcaaggacccagcctctcgcggcgggtcgctcggtgtgcacgatacgttgcaggaaggttgcgagttgcagatcagcgcaccacgcaatctgtttccgctggccggcgatgcgcggcgctcgatcctgctgggcggcggtatcggcatcacgccgatgattgccatggcttacacgctgcaggcatccggtcacgccttcgaactgcattactgcgggcgtgagcgcggccgcagtgcgtttttggcagagctggcggattcgccgtttgccgccaaggtgttcacccatttcgatgatgaagggcttgaacagcggctggacctggcccacgtgttggggtcgggcgaggccggggtgcacctctacacctgcgggcccgctggcttcatggagtgggtgatgcaaggtgcgcgtgagcagggttataccgaggagcacatccacaaggagtatttccaggtagaggtggacagttccggcgccagctttgaagtggtggccgcgcgtagcggcaagaccgtccaggtggcagaagggcaaagcatcctcgccgcactggcgcaagtggggatcaagatcgagatttcctgcgagcagggcgtgtgtggaacctgcctgtgcgatgtgcttgaaggtgagccggaccatcgcgacgtctacctcacggatgacgagaaagccggcaatgaccaaatcctggtgtgttgctctcgcgccaaatcaaaaagactcgtgctggatatctaaggggaacgacatggtagacgtaagcagttttcgtaatgcaatggccatgctcggcggcgccgtgacggtcatcaccaccgatggcgtggcgggtcggtttgggttcaccgcgtcagcggtgtgcagcgtgaccgactcaccgcccacgctgttggtatgcatgaaccgatcgtcccattccaacgagcacttcaagcgcaatggcgcggtgtgcgtcaacattctgtgtggtgatcatcaagaaatgtccggggcattcgcgaaccgtgcgttgacgatggatgaacgctttgccgtgacacagtggaccaccctggaaagcggcgcgccggtgatgaccgatgcgctggtcaatttcgactgccgtattgcccaggtccatgaagtcggatcccacagcattttctactgtgaggtccagaccatccgtcagggaaatgccgacgaggggctggtgtatttcaaccgtgcttatcaccgcctgggcgaggcgtccaaagcctgctgagcccggcccgttgcgccggctgccgatagcgtgccggtgtgtggcgatatgagcacattgtgtttttcaaggtatgcggcgtgtttctagaatgtcgccttagttgtttcgtgaaagcgctgaagtgcttccgtgccgtcggtcgccagtgcaagaacgggcagggttagagcaaaggcgatcattaaatgcgagggcagtttcatactgtttacccacgttgcgcgcacaacaaggcgctaaattaaattcagttgaaatgtaggtcagggctgattcgggaatatagggtatcggtacgggaatcaaccgttgtcataggttgtactcgcactttttgacctgtgttcagccgatgttcagcgttgttaagcttgaataaacaagttgcacggcctttacaactcttcacttttccaatctggatcgcctgaaaagcaaagtgctagtctgcgcttttttagagacggcagggacgcatgaataagctaacggaagtggctgtaaaaaagccctgttcatttatttttgtcgttgcgtttattgtattggctgtcctgcaatacaagcccgccgtgctcaattacaccacgcgctttgtcgactttgcccaatacatgcttgcgcacggcgtcacgctgtttccaatcgctgaagatctgcagccttatcccgattacaccgtgatcaatacactcctggtgtatctggtgtccctgccgtttggccgtgtgtccattctgtcgatgggcgtgcctttttgcgtcgctgccgccctgatgttggtgttcatatacaagttgggtgcgttgcatgagaagaaatggggcgcctacgcggtggtgtttgcactgttcacctggtcatttctagacggcgtgaactccctggcgctggatgtgtacccggcacttttcacggtgatgtgcttttacctggcctacgcgggcgaggtgcataaacagcgttatcggttgctgctggtgctcgccggcctggcactgggctttgcgtttcgtggcccgatcggcctgatcggacctgccagtgtggttgcctcttattacctgttgagccggcagtggcgcatgctggtggtgttctcgttgttggctggcgtggtcctggccacgggtatcgcgctgctgacttgggcggcctacgtgcagggcggcgatgcttttctgcaagaggtgttgatcatgcaaggactggggcggttcggcagtgatcacgcgccccgttattacttctacttttcggcaggcttgctgacctacggtgtcaccgcaatcattgcggtgagtgtgatcatcaagcagggcaaacactttttcgaccgaacgccgcatcccgtcacgagcatgctcctgtacctcaccggttggctcctagtgatcattgtgctgttcacgattccaagttcaaaaaaggcgcgttacatactgtcgatcaccccggctatttcgttgttggcggcctacgtcttcgtggatcgcagtgaagtgtttgcaaacacccggagaaaactgcttgggttctgcttggagttgccgctgataggcctcgtgatgctgttacttgcctatgggtacagcttgtatgcggtgaccccgctgcagcccaactacctcggcgcctgcctgggtttgattacgcttgtggccgtgcggccctggttggaatcacgctttcacgagcatccccatcgtgagttcgtcgtcttttctttcggggctgtcacctttctcatactggatatgtttttcttcaactccgttacttaccatctggagttggcccatgagccgacgcctaaattcctgccttattggttctggtgaacagtgagtctgcaaaaaaaacacgcggtgtttgcaggtgcaggcatctgcgcgatgctgctgggattggcggtgttcgtcctgcaaaacctgtccgatatggagttgacggacgctcgggtttcgacgctgacgtttcgctctggcgacgcacagttggtcgggacgctggtcttgccattgcatgtccaggcgccgcccgtggcgctgatcattcatggggatggtcccatggaccgcttcgcagcccacggctacttcccgctgatcaacagtttgctcgacgctggaatcggcgtgtttacctgggacaaacaggggatcggcgagagcacaggccattggctcagccagtcgatggcggaccgtgccacggaagcggtggccgcgctcgcccaggtgcgcaagcaggagggggttgcaccggacaaggtcgggtttctgggtttttcccaaggcggctgggtcattccgcgtgccgccagtggaggcgacccaggcttttcagtgattatcggcggggccgtgagctggcgccggcaaggcatgtactacacgcaggtacgattggccgaggaaggccgttcccaggatgagatcgacgccatcgtcaaagagcaatacgagaggaacgacaaggttttcggcacagcgaatcaagcctacagcccccacctgtttcccggtatggaccgcgctcatttcaacttcgtccagaaaaactacaacgaagacgttactgccgcagtgaaaaccatgaagggcccggtgctggcggtctggggcgaccaggacctgaatgtcaatacggccgaggactcaagcgtctaccggaagatgtttgctggcacccggggtaggcacgttgtggtcatccccaacgccacccacagtttgttgagggccggcctgttcaatgatcaattggtatcgcaatggccggcatggaaagagtacgcgttcatggcactggggcgtcacgcctatgtgccgggttccctggaactgataagtcgctgggtcaagtcctcaacgtcggggaagtgaatcgctctgcgctttaaacatcggcaaccgcttgagcatccacgtcaacagttcctgggcgggcgccgccaatggtcttgaggccttcaccaacagcttggcctccacccccagcaacagcggatggtcgatcagcaccgacgccagctcgccgttttcaatttcccggtaggccgcgaactccccggccagcgaggcaaagccgccagtcgcgaccaggcgcttgagtgccgccagggagttgctgaccagggtcgggcgtacttcgatcttctcggcgtactccagcagggtgatggcatggccgataccaaacgtggtcggcgtcagcaccaatgggcattccaatacctcggtcaccgtcgccatggtgcctcgcaccgccagcggatggtccgggcgcaccagcaacatcaccggctgcagcgaggcggcgcggtagtcgatgtgtggatggggcggcgggttgtaggccaggccgatatgcgcgcggttttcggcaacttcgttgagcacatcgtccaccggcaggatgtccagggtgatttcaagcctggggtattgcttgctgaaaggcgcgagcacgttgtcgaccagcgcatccacataaccttcgctgatcaccacccgcacatggccttgttgcaggcccttgatcgcttgcaattggtcttcgagtttttcctggtgcgagcgatagccgcgccagaactccagcagatgcgccgccgcctcggtgggctgaacgccacgggcctggcgctcgaacagcttggcgcccagttcttcttccaacagcttgatctggcgggtgatcaccgagggcgaggtgttgatgctgtctgccgcccccctgatcgaaccgtgcaccagcacttcgtggaagtagcgaagacgttgttgattgatctcacgcatgaaggatgatccgccttggaagttgtgttgtctacaaagcaacgctaagtgaacttagttgctcttgctgccgatggtgggccggcgcaccctgaattggcaagcacgcagacccacaaaaacaattggagactcgtatgccaacctcccgggcgccggcagaacattcagccatttctgccctctaccacaagctcaactggcggctgctgccgctgttgttcatcggctatgtctttgcgtacctggaccgcatcaacgtggggtttgccaagctgcagatgcaaagtgacctgggcttgtccgatgccgcctacggcgccggcgcggggattttcttcattggctatgtgctgttcgaactgcccagcaccctgatgctgccccgcatcggggcgcgtaaaaccttcagccgaatccttgtgctgtggggtatcacctcggcgtgcatgttgttcgtgcgcgatgtaccgacgttctatgcgatgcgttttttgctcggcgtgttcgaggccgggtttgccccaggcatgatctattacctgtcgcgctggtacggcccgaaccgcatggcgcgggcgattgccattgtgtttatcgccggccccatgggcggcattctgggcggacccttgtcggcctggctgatcaccacgcttgccggtgtcggcggtctggccggctggcaatggatgtttttgattgaaggcttgccctgtgtattgctcggcgtgctcatgtactgcgtgctgtccgaccggcccgccgatgcgccttggctgaatgaggcggaaaagcaactgttggaaaccgaactgggcacggcgaatgcgcgcagccattcattccgtgcggtactgcgcgaccctaagctgtatgtcctggcctcggcatacttctgcatcatcttctcgatctacgccatgagtttctggctgccggcgatcatcaagaccctgggcctgcaagacacccagcaagtgggctggtatgccgccatgccctatgtcggggcggcactgggcatgtactggatcgggcgccgctcggaccgcctgggcgagcgccggctgcactgtgccgtcccggcggccatcggcgcgcttttgctgatgctctaccccttggcgggtggccacctggtggggtcgatgaccttactgacgctgtcgatcagcatgatgttcatggcctacaccgtgttgtgggcgatgccctccgagcacatcaagggcgatgcggccgcaggcggcattgccttgatcaacaccatcgggctgtccggtggtttctggggcccggccatgatcggctgggccaaaaccgccaccggcagcttgaacacgggggtcgtagccgtgggctgcgtgttcctgtgcgcggcgttcgtgatcattgcgaccaaaccgcgaacgcgcaccggcgcggcgggcgagtacagcgcgggttgagtggcccgccatcattgaaaaccatgaggaacccaagatgcttctatacctgtcgacatgggccgagatcggccactttctcgagcgcagccgcaccatcgtcatccccatcggctccaacgaacagcacgggccgaccgggctgctcggcaccgactggatgtgccccgagatcattgcgtgccaggcgcaaaaaaacgccgatatcctgatcgcgccgaccttcaacatcggcatggcccagcaccatatcggcttccccggtacgatctcattgcggccctcgacgttcattgccgcgatcagcgattgggtgcattcgctggcagcccatggttttgaaaagatcctgtttctcaatggccatggcggcaacgtcgcctccattgaagcggcgttttccgagctgtatgccgaagccagctttgcccgtcgccctgcggggttcgccctgaagttatgcaactggtgggacctcgacggggtgggcgaactggccaaggagcagttccccaccggccacggtatccatgccacgccgtccgaaatcgccgtgacccaatgggcctacccggactcgatcaaaaccgccgattactcaccccagatcgcgccgtgggggccgattcgcgaagccttcgacttccgcgcccgccacatcgatgggcgcatgggctcggacccggcgcaggcctccccggagaaagggcgagacctggtgatgatggcggcacagggcctgatacgcgaagtcgaggcgttcaacggcgagccgatcccgggctaagagccagccctttcaaggcctttaggtagaacaggcggtaataccctgtggcgagcgggcttgtcccgcgttgggctgcgaagcagccctgaaacccccggccgaagagtgcctgattcaccgcattcctccatctagggtcgcttcgcaacccaacgcgggacaagcccgctcgccacagttgcagtgtccgcccttattggtatggtatcagccagattgggtcggtttttcaaagaccttgaaagggctggggctaagagcactttcacgccaatccgggcgctgagccgtcaacgctcatgtttagcgcgtggtggtgccaggaagccccagtgcgctcagcttttcacgtacgtgaatcagcttttcctggttcgtacggatgaacgctgagcgctcatcaacggcggctacgatcttttcaaacgtcttgagctgtggcgcaaagaagtcgagcagtttttcgtcatcgccgatcaggtcgtagatgtccttgaaggaactcttgatgaccgtggtaatggactctttggcggttttgagttcctgttcgagttcgtgagccttgtaggcactcaggaggtctgaggtcagggtgaaggctgcaccggcaggaccggcccatttggaaatggccccggcgattttggttgcctgccacggcttgaatttgatgacgacgccggttaccgagcccagcacatcgcgcgcggcaaacactgcacccttgatgatgtccgggctcaggttggcgatgcctttcgccgcgccgcccatggacttgagtgcgccttcgctcatggcattgaggaagctctcacttgagtcgagctgacgcccgatgtcctgggaaatgcggctggtgaccttggacgattgatcgaacgaccggtcgatggcgctcttgatcctcaggttgagcttatagccgacaccttcttcggtgtagccgatttcgtcctcgagaaagtcacggatgttctccagtgacaaagggcggagcttgcccagcaattcgttttcgatatttcgcagctcctcgaacaactccccggcaagacgtttgacgtcgcggcggcccttggaaatgtcctgtttgatccgttcggactcctcggcgttctgttgtgcgaacgcatccagtctgcccaattgctcttcagcctgggccacatgctggccgacgacatcgcggaccacgtccatgccggtcttggccatcaggaccgcgggtacgttgtcctgcagaatgcgagtggtcatggctttcaggtcgttgatccgcgagcggctttcataatgctcgggtttgctgaaccagaattccaggccgcggccaccggggttagaggccaggcagacgatattcaaacgtgccagttcttccgaggtcaggttagcggcccgctgcagcttggctttcaagttgtcttttttgatggcggcttgatcgtcgaacagcgcctgttcggtcaagtcagtcacttcatccattttattgatgacgaagaccgtcgaagacagtttgttcaagtcgcgcagtacccacttggcgatagcactgtggctatccttgagcggattggtggcgtccacgacgtacaagatcagatgcgcttcggagatgtaacgcttggtcaggtcttcataaaccacctgttggccatcgacagtcttttccttgtcgccaaagaggcctggggtatcgacgatctcgcatttgccgggcaggccttctggcgtgtaaatcgccaggcgatcggaggactcgtccatgtcgatcttcatgtcggccatgattttacccagccatgcagcgatcacgctggtcttgccgtcggagaaggcgcccagcagcgcaatacgtagaacgtcggactcgatcgcgttgacagcggaatcaatcttttccatttcggcattaacgtcggcgcctagctcgcccagctctttcaggatgaaccgaagctgatccagtcctttgatcgctgcctgtttatcaacattaaattgcgtgaattgttccatggggcattttctccagttgatctttagtgcgctgcatcagggccatctgctgcttgatgatgtgcagcgggcgaatcagggatgcatggatgtcgctgacttgtccgaggaccttctcttcgatttggctgcgaatcggtgcgagcaactccttgagttcatcacgcagggagtccacagccttggcgcgtgcctctgcgatcttttcctggacttgagcctgggctttgcggatgcgtttttcctcgctgagaaggaaattcatgaggttgatcaaaaagcccactgcggcgccgacggccgcgccaatcaggttgccgacaacaggaaacgcggtgccgatacctgctcctgcaagggcataagaaccaacgttgaacagcatccagccatagtctttaagatccaggccaaggcccagttcgggtgtcttgtagctggcattgaggtcttctgctacataagccacggcctgctcgaattcaacccgcgaaacatcctcgagcaagcgctgcatggcctgcacaaggtcaccctggagctctgccaggtacttttcgaactgggtctgcaagtcgtctttcagttgctcctgacgctcgcggaaggcgcgctggatcttggtggaaatcaaatcgttgttgccaaaatgttcctcaacgatgttgtcggcgcgggcactcaaatcgatgaagagtccgttccacaggttttttcggccatcctgcaaaaggcgttcgaacctgaccagcccatctttgatagccgcgcggcattttttgaattccggctctgtccgggcgatgaacatttcgtgctgcgtgtggagcgcttgcaggatggcgaggttttccaccagcaattcatgcactttggtcttgttgctttcgatcatgtcttctttgaacgtgcccagttttccgtgaagcacgcgggcgactgatttgatctggctgaactcatacatggctttcgacgaggcgaaatacttgcggtaattgcgctggtgaatgaccaggtcccgatcccgggacgggtggatgctcgtgcgttcggtccctggtgcaatggccagggatgaaaaggcgagcaagccctgcacgcaatgtccgggctgcatggccttggcgcccagcgcggactcaagtacaccgatggtttgctgcaatgcctttgtcgagtcgccatcgctttccagagacgcaggaacgccgtcgaattcgaattggtcagcgttaccgcgcacgttcaccaggggacacacttgggtgccgaggcgcaaataggcgcgaatcttctctgcagtggctttctcaggcttcttgttggtgccattgacgtagaacaccaggtgcgctttggctactgcttcgcggaccatatgagcgtactttccttcgtcaccctcaatgccgggcacatcgatcaactgaaagcgtttgcccttgtagttgagggtgtagaacgtattgcccttggtgaagtcctcttcgcctgtaccaatgatgcgaccgtctgtgcgcgaggccagcgcctttttccggctaaggaccaaggtcccggaatacacgctggccagccgctggttcaacacctcatccagggtggccgaggcggtcttgatgtgagtgaaggggcttgcgatggtcccctcattcgacagggtggtcgcttcatcgaacagttcgtcgagctcgaaattgctcatttcacgctcctgccagtttcaagagcgctgccgatgccgcagcccccagaaccagtccgccgcaggtaaaaacaatcaacttcgtcctgattctggcgttggattgttcatgggccagttgcagtcgttgcgccgcctcttcctgctgggccttcagctgttgggcggctattgcctgttcggcttcaagctgttgcgcggcggctgcttgctcattctttaatcgggcattggcctcttgctgcgcgagggcggttcgggccatggcctcggactcagcgatgcggtttctggacagggcctcttcctgcaaaatctcggaaagatgacgcgtcccctggcggatttcagtgatttgcgctgcatactccgcgtaaaccgcattcagcccttcgcgcaatccatcgatgtgttcagccagcgcctgttcatacttcaccaagtcgtgggcgttatgttccagcagcgcttgccgggactcttctttgaacagaatgcgcaatgattcgatgatcgtgctcttgcccgcattggtttcgccgaaaaacgccagggtgaacacgtcccactcggcatgggttttcaactggtcgagttcaccatcgaaacgaacctggatggcgcgaagcttctcggtcatgttgccaacttcgcgcttgccctctttgtgctcgacattcagttccagaatatcggccatggcgctggcgatactgtctgaaacgtcggagtacaggcggttaaggtcttggggcgcgttcattacagttccttgtgtgctggcgtctaagggatgaaggtgtaacgtcaggaggtgatgtgccgagtgtcacgcgagcccacggtgggaggggtgctgctcgttggtctggcacatgggtgaatcgcaggcagccgccatggccggttcagtccagcggcaatgaaacggtattaggcgtataggaggagtgcgtcgcgagatcggctcaaaaacagccgtggaataagttgcctgaggcattcacaacatccttgttggtgtgggacttcatgcttgcaaagcatgctccatagcactacatcggccctgcggatgaaagctttagtaggacagcctaaattgaaaccttgcgcgggacgcaaggcgacctttagtgtttgccatcaatcccatttttggaccaggcaaggaagtcagcatgacgcaattggcggctcagacagtctcatcggcgtgcgcagcattggttgaactggatacgcttcaaatacgatcctccgctggcaacctgagcccggctcaacacgcgtttgctgactatctggcgaacctctggtcaggtgctccaggtgctttcgagcatcgttatccgatcaccaggagtcgggtgtggaagccatggcggcaacaccctcagcgccagagcaacgactggtggtgtttgtccctggccgaggcagccaggcactactcctggccggaaaaaaaagcacctgatgacttcgccagtattgcagcgcgatttcgcaaggcgctcgttgagaaccagtgcgttgatgcgcgcgcggcctgcctggaaatattcaaatggggaggcgttggcaataggcccggtaatgcgtccgtgcggtgggtgcagacgcaggctgccgagaggactctgtgctgctctatccttcgtgcgatcgcactgcttggccctacgaacaaccagtcactggcggttttcgacggcacgaaactgctgatgaattccgcgatgaccaagatctacgctgctgcggctcctgagggcatcatcatctacgatggccgggtgggggccgcgctggggttgttggtgcgaaaatggctggatgggacagaggaatgtaaggttccgcaggatcttgcttttcgctggggccccaggcagaaaacggccaataacacagtcgaaacacgtgacccttcgcgagggagcttcacatttgacgatctttacaaaaaaagccgcgcagggcagccacatcaatccgaggtgtgggccgagcttgtgcgaaccacaagccgcatcctgtgtgaggtgattcggatactcaaggtacaggggcaggatacgacgctcctcagtctcgagcgtgcattgttcatggtgggttttgatgtgcgtcaatcgtcaaggctactcaaatagccgaacagattcgccgcctccggtgacagccgcgccggatccgccacgccgacatataaggtccgcgccacccattccccctccagcggtatcgcccgcagtttcgcttgcagcagttcgggatgcaccgaccccaacggcaggataccaatccccaatcccgcctcgatcatccggcagatcccatcaaagctgctgacctggatacgcaccttcaagcgcttgccggtgccggcggcggcatcgttgatgcgccgcagcagcgagctgccctggttcaaggcgacgtagtcaaagtcgagggtatcggccagggacacgcttgagcactgcgccagcgcatgcgtctgcggcaccagcaccaccaggcggtcgcgtcggtaggggcgcacgtgcaagccgggtgcgggcacgttgtcggcaaaaatgccgatctcggcctcgccgttttccacggcgtgaatcgtacggtcgctcagggcttcttccagttcgatacgcacgtgggggttggccgccagaaaggccgccaagtctgccggcaggaactggatcaccgccgaggtattggcaaacagccgcacatggccacgtacacccttggcgtaatcgtcggcgtcatgggccatctgctgggcgacgtcgagcattgtgcgcgcatgctcggccaggcctcgaccggccggcgtgagttgcaagccgcgggggacgcggttgaacagggtgcaatgggtcacccgttcgagttcggccaggcgcttgctcgcggcggaaacggtcatgtgcgcgccgttggccgcctgggtgaggttttgcgtgttggcggccagcaccagcaggcgcagcgacaccaggtccagttgcagcaggttgatcatatttacgccctgggtttccaatctggaaagagtagtggaaatctttgaaattctcacgacctgtctttggcgcgattatccgggcatcgcctccaacaacaacggacaacgtcatgagcctacccctggaaggcatcaaggtggtcgaaatgggccaactgattgccggacccttcgccgccaagatcctcgccgagttcggcgccgaagtgatcaagatcgaaccgccaatcaccggtgaccccctgcgcaaatggcgcctgctgcacgacggcacgtcggtgtggtgggccgcccagtcgcgcaacaagcaatcggtcaccctcgacctgcgccagggcgaagcccgtgaagtggtcatgcggctggtcaaggacgccgacatcctgatcgagaacttccgccccggcacccttgaaaaatggggcctgggctgggatgcactgtcggcgatcaaccccggcctggtcatgctgcgggtctccggctacggccagaccgggccgtatcgcgacctgccgggctttggggtgatcggcgaggccatgggcggtttgcgccatctttccggcgagccggggcgtacgccggtgcgcgtcggggtgtcgatcggcgactcgctgtccgccttgcacggggtgatcggtgtgctgcttgccctgcgccatcgcgagcagcagcacggcgccggccagcaggtggatgtggccttgtacgagtcggtgttcaacctgatggaaagcctgattcctgaatattcggtgttcggcacggtgcgcgaaccggccggcagcagcttgcccggcatcgcgccgaccaacgcctaccgttgcaaggatggaaagtatgcgttgatcgccggcaatggcgacagcatctaccgacgcttgatggagaagatcgaacgcctggacctggccgacgacccggaactggcgcaaaacgatggccgcgtacgccatgtggcccgcatcgacgcggcgatttccacctggacggccgagcgcaacctcgatgcggtactcgccgcgctgaaggacgccaacatcccctccggcaagatctacgacgccgccgacattgccgccgacccccattaccaggcgcgcgacatgctgctcgccagccagctggacgacggcaccgccgtcaccttgcccggcattgtccccaagctgaccgccacacctggccgcgtgcagtcgcgcgcgccgagcctggggcagcacaccgatgcggtgctcgacggcatcggtatcgacgcaccgacccgcgccgcctggcgcgctcgcggcctgatctgaaccaaggagcccttcaatgaaacgcctgtacctgcaggaagtcgccacccgtgacggcttccagaacgaaaagagctttatcgacaccgagcagaaaatcgccctgatcgatgcgctgagccagtgcggctacgccaaaatcgaagtgacctcgttcacctcgcccaaggccatccccgccttgcgcgatgccgaggcggtgatggccgggatccagcgccaaagcggcgtggaatacacggtgctggtgcccaacgtgcgtggtgccgaacgggcgctgggctgtggcatcgacgaggccaatctggtgatgtcggtgagcgagccgcacaaccgttccaacctgcgcatgacccgcgaacagtcgttcgcccagctcagggaagtggtgggggtgatcgggcgtgggccggtggcggtcaatgtgtcgctgtccacggtgtttggttgcccgatgcagggggatgtgccggtcgacgaggtgctggcgtggatcgggcggttcgccgagctgggtgtgcgcggcgtcacgctgtgcgacaccaccgggatggcctatccgacgcaggtggagaatttgtcacggcaggtgcgcgagcgctttcccgagctgcaactgaccctgcatttccataacacccggggcatggcgctggccaatacgttgggggcgttgcaggccgggatcgaccgcttcgacgcgtcgcttggcggcctcggcggctgcccttatgcccccggcgcgagcggcaatgtgtgcatggaagacctggtgcacatgctccacctgatgggctatgacaccggcctgcacctggaccgcgtactggcggcgtccgcccgcttgccggggctgatcggccatgccacccccggccagatcctaaaggccggcaagcgcctggacctgcatcccattcctgcacacgtgcacagcctcagccaacaggtagcccaccatgattgatcatctcgaccacctggtcctcaccacgattgaccttgccgcctgcacagacttctacacccgcgtcatgggcctgcgcctggagacctttggcaatggccgcatcgctttccgtttcggcaaccagaaaatcaatgtgcacgagcgcgggcatgagttcgagcccaaggcccacctgccggtgccgggcgcgctggacctgtgctttatcgccagtgtctcgctggacgcggtggtcagccatttgaacacccaggcctggccgatcatcgagggcccggtgctgcgtaccggtgcgaccgggccgattcgctcggtgtatgtgcgtgacccggacctgaacctcatcgaaatctccgagcaggtgcctgcatgaatatcgtgtttctcgacggcgcgagcctgccgtcagcgttgccgcgcccggctcaagccagcgcctggaccgcgcgcgaaaccacccgccccgagcaagtgcttgaagccctggccgacgccgacgtggcgatcaccaacaaggtgcgcatcgaccgtgcgaccctggcgcaattgccgcgcttgcaactgatctgcgtggcggccaccggctacgactgcgtggacatcgccgcctgccgcgatcagggcgtgacggtgtgcaacgtgccggcgtacagcgcggtcagtgtggccgaatcggttattggcgccttgtttgcgctgcgccgccacctgctggcgtaccgcgcggcgtcggccagccagtggccgcagtcgtcgcatttttgcgtgcacggcgcgccgatccaggacctgcaaggctcgaccctgggcatcgtcgggcgcggtgatatcggcagccgcgtggcgcgcctggccaaggccctcgacatcaccgtgctgttcgccgaacaccgtggcgcgccgcaggtgagggcgggctacaccgccttcaacgaggtgttggccaggtccgatgcgctgaccttgcattgcccgctcacgccccacacgcgctacctgatcggcgccgccgagatcgcccggatgaagcccggcgcgttgctgatcaacaccgcacgcggtgcgctggtggatgaaaacgccgtgctcgatgggctcgccagtggtcaattgggcggcgcggcgctggatgtgctgcacgtggagccgccgcaggccgaccactcgttgctgcattgcgagcatcccaatctgctggtcacgccccacgtcgcctgggccagccaaagcagcgtcgcacgcctcaaggccgtgctggccgccaacatcgaggcattcgcggcacaccgaccgaccaacgtggtgacctgaacgccccagcgacttccttcctgaaacctataggcagagccatgacaaaaataatcagctcgtccgtcgactccgtgaatcaggcgccggcacggcgcacaccgctgtaccagcacctgtatgtgcaagtgctggcggccattgtgctgggggggatcctcggccacttcagcccgggcctgggcgaacagatgaagcccttgggcgacaccttcatcaagctgatcaagatgctgatcgcgccgatcatcttctgcacggtggtcagcggtatcgccggcatgcaggacctcaagcgcatcggccgcatcggcttcaagtcgctggtctactttgaagtactgaccaccatcgccctggtggtcggcctgatcggcgtcaacctgttcaagccgggcgccggcatgcacatcgacccggccagcctcgacgttgcggccatcgccggctacaccaaggcggcccacgaccagagcgtggtcggcttcctcacccacatcgtgcccagcaccgtgttcggtgcgtttaccgacggcgacatcctccatgtgttgttcatctcggtgctgtttgcctttggcctgcaactgctgggcgacactggcaagccgttgctcaacaccatcgacctagtggccaaggcgttcttccggatgctcaagatcgtcatgtacctggcgccgctgggcgcgttcggcggcatggcgttcaccgtgggcaaatacggcgtacagtccctgggcgcctacgtgaacctgctgctgtgctactacgccaccgggctggtattcgtgttcgtggtgctcaacctggtggcgcggctggccggtttcagcctttggaagttcctcaagtacatccgtgaagaactggtgctggtgctgggtacgtcgtcctccgaatcggccttgccgcgcctgatgggcaagctggaaaagctcggctgcgagaagtccactgtcggcctggtggtgccgtccggttactgcttcaacctcgacggcagctgcatcaacatgacggtgctggcgatcttcattgcccaggcgctggacattgacgtgtcgctgtatcaccaggtgaccctgctgttgattctgctgctgacttccaaaggcgcggcgagcgtgacgggtggtgcgtttattaccctggccgccacccttggctcgatcgatgtgatcccggcggcgggcctggtgctgttgttgggcgtgtaccggtttatctcggagggtggcgcgctgatcaacgtgatcggcaacggcgttgccacgctgttcattgcgcgctgggatggggcgttggatcgcgagcagctcaagcgtgaattggggtagggcgcaggctgggaaatgtacgccgctgtacactcgctgtgcaccacgcagcgtggggtgtagagtggccggcaattcccaggcaaaggtgacccccggatggcgcaatcggcaaaaccgcgaggcaagaaccaggacacgggctggcgaggctcggtcgatgtgtggctggacgccgcctacgcggcgttgaaagagtcgggcatcgacgccgtgcgcgtgatgccgctggccaagcagttgggcttgtcgcgtaccagtttctattggttcttcgaggaccgcgagcaactgctcgccgccttgctggcccgttggcgcgacaagaacaccggcaacctggtgcaccagtgcgagcgttacgccgaaagcatttgcgaggcgattctcaacgtctttgaatgctggctgaaccctgagctgttcgactcgcagttcgaatttgccgtgcgcagttgggcgatgcagtcggcggaggtctcggcggaaatcgcgctggccgatgacacccgtatcaacgccctgaccggcatgttccggcgctttggctacgatgacgaggccgccgatgtgcgcgcgcggaccatctacctcacgcagatcggctacatctcgatgaacaccagcgaggacgtggtggtgcgcttccggcgtattccccagtacgtcagcgtgttcaccggcaagcccttgaagcggcgcgaactggaccgcttcttcggggcgtttggctacgccgagaccgcaccgggggagtttgagctgctttagaggtccttgaccaaccgcaacgcgtcgtagatcgccgcatgggtgttgcgtgcggccaccgcatcgccgatgcggaacagttggaagcgaccctcggggttggtcaccaggtgctgcgcgttgccggcgatcaagtcatgctgctcgaccgcgccgccgttgctggaatgcccacgcaggtcgaagtacaggtcatccagcggcagggtgccgtggttgaccaccacctggtccaccacccgctgcttgtgcaccgcgccgtagtcactgccgaaagtgaccagcagccgaccgtcgcgttgctccaccatctcgacccgataggtcacggtaaaggttacgtccaggtcctgcaggctgcgcatgtagggcaccaggttcatggccatgacttccggcgcgaacgagcggtccggggtgacgatttcgacgctggcaccgctctgcgcaatcacctcggccgcttgcagggcggcgtggtcaccggcgtcgtcgaagatcagcacatggcgccccggcttgacgtcgccggaaatgatgtcccaggtcgacaccaccagctcattgccctgggccagcacctcggtatgcggcaggccgccggtcgccacgatcaccacatccggctccagcgccagcacggcctcggcctcggcccaggtgttgaagtggaacttgacacccaggcgttcgcactggctcatgcgccagtcgatgatgccgatcatttcgcggcgccgctcgctcagggcggtcaggcggatctgcccaccgggccggtccgccgcttccagcaccgtgacgtcatgcccgcgctcgccggcgacccgcgccgcttccagcccggcaggtcccgtgccgataatcagcactttgcgccgcaccgccgccttggggatgtgatggggcatgctggtttcgcgaccggtggcggggttgtggatgcaataggcggcaccgccctggtagatgcggtccaggcagtaattggcgccgacgcagggccgaatgtcttcttcacgccgttcgatgatcttgcgcacgatatgcgggtcggtcatatgggcgcgggtcatgccgaccatgtccaccttgcccgaggcgatggcgtagcgcgccgtggcaacgtcggggattttcgccgcatggaaggtggggaacccggtagacgcgcgaatctcgccggcaaaatccaggtgcggcgagttgcgcatgccctggatcgggatcacatcggtgaggcccgcgtccgtgtcgatatgcccgcgcaccacattgaggaagtccaccaggccgctgtccttgagcatgtgcgacacctgcaacccttcgcaggcgccgaacccgcccggcagcgcctcgtcgccggtgtagcgcacgccgagcaggaagtcttcaccgacccgctggcgaatgccgcgcaggatgtcgaaggtaaagcgcatgcggttttccagcgagccgccgtacgggccatccagatcgttggtgagcggcgaccagaactggtccatcaaatgcccgtaggcttgcagctccaggccatccaacccggcggcctgcatgcgctcggccgcgtcgacgtagtctttgatgattcgctcgatgtcccagtcttccagcttcttcgggaaggaacggtgcgaggcctcgcgccggtgtgaaggcgacaccactggcagccagtcggccttgtcccagcgtgtgcggcggcccaggtgtgtcagctggatcatcaccgccgcgccgtgttcgtggcactcgtccgtcagatccttcagccagccgaccacttcatccttgtacgccagcacgttgttgaacaccggcgggctgtcccgcgacaccgctgcggagcctgcggtcatggtcaaggccacaccggccttggcgcgttcgacgtggtaggcgcggtacagcgcctgcggcatgccgtccaccgggtaggccggttcgtgggccgtggtcatgatccggttgcgcagtgtcaggtgcttgatcttgtagggctgcagcaggggatcgctggacatcagagtgtgctccgtcgtgggcatcatcaggcttggcgatttgaaattagggtaaatgtacaggtgtgtcaataatgctcgacatgcatgtacattttaagtgcgacctgctgatgttctgcaaacgatgcaggcacgtgagagcacggtgggcaaggcggtggcggcgtattacgcggcgaacaaggcacggtccgaggggatgttcaggttgtggtttacgggctttttgtggtgagcggggcaagcccgctcaccacaaaaagccggcaagccacaacaacccgcaaaccacagcgtcaggcgtatgaactgccatgggctgctctcaacaaatcgcgcacggcatcggtgcgcagcagcagggtcatctgcgcctcgtcgatcacgatttccgcgatgatcaacgcgcagatcagcggcgcggtcacgaaccaatggcaccagcattgggttgccagcgaaacggctacgccgatgatccacagcgccaatacccacttgggcgcgcgctgttgcagcggcacccacaaccgctgcagccgtttcagccgggcagtgtgcagtttcaacgactcttcaaggagtgataaggacgaattcatttctcacgctcgctgagctatccgggcgtggctgggaaagggattgcccagccacgacaagttgatgcattcaacttcgatccagtgcccgtttccaggcagtgctgcacagcttttgaatgcaacgcacataccctcggtgtccaataggacaaagcatcgatagcaccgggttgttctgaacatcatggaaaagatgcgcatggtggggcctggtttacttaaagattccaactgagttcaaacagcgttccgccgttttccattttccggcacgtcaccgcaccgccgtgggcgagggcaatcgcgcgcaccaccgccaggcccaggccgctgccaccctgggcgcgggaccgcgagttttcgccgcgctggaaggcatcgaacaggtgcatggccaggtcctcatcgatcccggggccatcgtcgcgcaccctcaggtagtgcatgccatcgcgcgtgctcaggtgcacgttgacgttgccgggcgtggcgtgccgacgcacgttgtcgagcagggccagcagcgcctggcggattcgagcggggtcgcagcgcagggtgcggcgttgcaggtccagttgcagggtaaaaccggcggcgaccaggctcggttcgaacagccgcacatcctcttcaatgccggccgccaggtcggcgtcttgcacgttgagttcgaggtagccgctgtcgcccaggcccaccacccgcaggtcctcgatcatccgcgccaatccttcgacctgaccgagcaggctgtagaactgcgccgtgtccggttcgaatacgccctcggccaagccttgcaggcggccgcgcaggatggtcagcggcgtgcgcagttcatgggcaatcgccgcattccagaatgcctgctcctgggccatgcgcttcaggcgctgggccatgctgttgaagtcatccaccaggatcgccgcctcaccgatggactggtcaccggcgacggcttgcacgtcgaggtcgccatccgccagtttgcgcaggttttcggccaccgagttgagcggcatcaggatccgccgcgacagccgcgtggccacgaaggcacccaccgccaggctgacgcaggtggtcaaggccatccacgcccactcgacattggccggcagccaggcatcggcctgctcgtccgagagcggccagtaggtccataacagcgcataaaacacgtaggagccgatcacggccagggcgatcacgcagagcaccaccgccgacatggccgcaatgatctggcggctcaagccattgagcttcttcacacgccactcccgaaccggtagcccacgccgcgaatgctcgccggcacgccttgcagccccaggtcttcgatcttgcggcgcaacttgctgatatggctgtcgaccgtacgttccaggctgtcgctttccggtgagcacaacgccaacaattccgcgcggctgaacacgcgtttgggggccctagccaattgggcgagcagtttgaattcggtgacggtcagcagcagcggcaacaccttgccctcgatattcagcgtgacctgatggctttcgatatcgatttcaaacccgtccacccgcaacacattggcaccggcggcatatttgtagtcgatggagcgtcgcagcacggcctgggtacgcgccaccacctcggccgggttgaacggcttgacgatatagtcgtcggcaccgatgcgcagccccatcagcttgtccatgtcctggtcctgggcagtcagcatgatcaccggcgtattgccgcgatggcgcacttcggccaggaccttccagccatccacatgcggcatcagcacgtccagcagcatcaggtccggcttgagggtctggtgcagttcgagggcgcgccggccatcgagggcgtgcgcggtacgaaagccactgcgcttgagataggcgatcaggatgtcggcgatctcgggctcgtcttcggcgatcaggatcagcgcctgggcgtctcggacgctgttcggacggggcgtcgatgtaaaggggaaatcggtcatagtctgctcggtgaataaaccttgtcgtggttgccgctccatggccacgcttgcaagtgttgatcatagcttctgggtgagggcgcccaacatctggttggcggtggaaatcactttggagttcatctcataggcccgttgcgtggtgatcatgttgaccatctcttcaacggtgctcacgttggaggtctccagggaccgttgcagggtggtgccgaagccattgagccccggcgtaccgacctgtggcgcgccgctggaggcggtctccaggaacaggttgttgccgattgcctgcaagcccgcagggttgatgaagtcggcggtctgcaggttgccgatcacttgcgcagcggggttgccggccacggtgatcgacaccgtgccatcctggcccacggtgaaggtcttggcgttgtccggcaccacgacggccggttccagcgcaaagccactggccgtgaccacctggccattggcattcaggtgaaaggtgccgtcgcgggtatagccggtggtgccgtccggctgcagcacctggaaaaaaccgcgcccgttcaccgccaggtccagcggttgcccggtggtctgcaggctgccggcgctgaagtttttctgggtgccgacgatctgcacccccgtgcccagttgcaaccccgacggcaacgcactgttctgtgtcgactgcgcacccggctggcgcttgatctggtagagcaagtcctggaactcggcgcgatcacgtttgaacccggtggtcgagacgttcgccaggttgttggaaatcgtcgtcagctgcgtgtcctgggccgacaagccggtttttgcaacgtacagggctggaatcatgccgttctccgtgtgaacccggtcgaccgggcactctgatgaaacctattgtgcgcaacgaacgtgcgcattcaggggaggttttgtggaggaatgatggagagcggcattttttgttggccctgatcacttcaatccgggttcgatcaggccggcgacgccacgtccgatgacctccgggtagctgtgttcggcatccaggttggtcagcaccaccaccgtcaaccggtcgtcgaggtagcgcgcgatggacgaggtaaagccttgccaggagccgccgtgctcgaccacggggtggccgttgatcgtgcggatttcccagccgaacccgtagccttgcgcccgctgtttgccggcgtaggggtagggcgtccacatccgttgcagcgaggcgtgtgtcagcagggtttcatcgtagagggcgcggtcccagcgctccaggtcgcggacagtgaaatagagcgtaccgtcagccgtggcattgaaggtcggcgacacccattcctgattcctcagctcaccgtcgacccgctcgtagcccgccgcccggttgggcactatctcaaggtccgagatgacccgtgatgagcgcatgcccagcggtgtgaagatgcgctgctggagaaactcaccatagggctgcccgctgacacgctggatcaggatgccgagcagcacgaaattggtgttttcgtaggcccagttctgcccggccttgaagtccagcggcagcttggtgatcgccttggccagctgcgcttcgctgaagtcgcggcgtatatccaatgggccgccgggcttttgcagcgctggcgtgtcgtaggccgacaagccggacgtgtgggacaacagatgggcgaccgtgatcggcgcccaactcgccggtgcctcggggaagtacgtgcggatgctgtcgtccaggccgaccttgccttgctccaccagcatcatgaccgccgttgcggtaaaggatttacccaccgagccggattgcaacacgctgtcggcgctcatgggcacgttgagttccacattcgccaggccatagcccttggcgagcacggcctggccgtttcggtagatacccagggccaggcctggcaactgctgccgggttatttctgcgttgacatagcggtcgatggccgagcgctgttcgtccgtgagcggcgtggctatcgccaggggcgcggacatcagcaggacactcgccgcaagggttcggaacatgggcacctctgaagcgtttttgcggtttcaggaggtgccagtgtgcgcgaggggggtggatgtttgcgggaggtttgatggagggtgcatgtagtcgatagggccagcactcactgggggggggatgaatttcacctacctgttggatgtttatcgaacgtgtgggcaagtgatcatctcgacagagtggatttagcctttgatttggtcggttggcgtgcctagtactcgatgcaactctccagcgagtgcgatcaactgctgttccagcgcttcgacttcgcaaaggctgattccctccttgatgacttgcagggttttggcttttctcgtcggtgcgggtccgaggttatgcgcgtcttgggaaaccaacacttggcgcagtaggttgttgatcacggtttgataaccggtacctgcattttccgctcgctcgcgggcggctgcaatcaccgcatcatccagcatgatagtgattcgggttttgcctttgttgctggcgactgcaccgcgcttgccggagctgaagtcgtattcgtctttcatggttcaagcctccaagtactggcgccgttcatttttggatgcgcgcctggcactgataatccgtacaaaatttggatcgcggtaggtgtaggccactaccaatacgcgtccctttgcgtccgtacccatgattatccaacgctcttcgtcgtgatcattgtcttgtatggttagagcggtctcgtcgtaaaacaccggttctgcatcggcaaggctcacgcccttgtgcttttgctgattagtgatgctttttgctttgtcgtattgaatcctgaaagttctcattatgcatattttatatgtatataaaagcaattggacaaagcgacagtcagggcattggttcagcgtctgcgggtcccgatttgggtacgcacatccctacctatcagtgagggatcgattttgaggagggtgcccgcgtatgtccgtgcgtaaccggtgatccgttaagtagtcagattccgattccatagccagataaggtcttatgtcgatatcagaccaacccccgccgtttccaggctattttcgcgccggtcagcccgcgtaaggtgactcatcattcaaaaatgatgatcgcctgaccctccagtcagtcctcacgccgatcaccgagaacaacaaaaacaatgaatagcctccattccagcgactcgaacggccagttggcgcaaggcttcaagccgcgccatgtcaccatgctttccattgcggggattatcggcgcggggttgtttgtcgggtccgggcatgcgattgcggcggcggggccggcggtgctgctggcctatctgttttccggcctgctggtggtgctggtcatgcgcatgctgggggagatggcggtggccaacccggacaccggttcattctcgacctacgccgaccaggccatcggccgctgggccggcttcaccatcggctggctgtactggtggttctgggtgctggtgattcccatcgaggccctggccgccgggcatatcctcaaccagtggttcccgcagatcgacgcttggctgtttgccttgttgtcgatctttttgttggtggtcaccaacctgttcagtgtgtccaagtacggcgaattcgagttctggttcgccatggccaaggtgatcgcgatcatcgcttttatcggcgtgggcttcgcggtgctgatgggctgggtgccggagcgtgaggccagtgggcttggccagttgatgcaggaccatggcgggtttgcgcccaacgggctgtcggcggtggtcggcgcctttatcaccatcatgttcagttttatcggcaccgaagcggtcaccatcgcggcggccgagtccagtaacccggcgcagaacatcgcccgggctacgcgctcggtgatgtggcgcatcggggtgttctacctgttgtcgatcttcgtggtgatctccgtggtgccatgggatgacccgttgctggcctcggtcggctcttatcagcgtgcgttggagttgatgaacattccccacgccaagctgctggtggacgtggtggtgctgatcgccgtggccagttgcatgaactcttccatttacatcgcctcgcgcatgctgttttccctcggcaagcggggagatgcccccgcgctgatgaacaagacctcggcggcgagtgtgcccagggcggcggtgatcgccagcaccatcctgggcgcgggcgtgaccctgctcagttacttcatgccggccgggctgttccagttcctgctggccagctcgggggccatcgcgttgctggtgtacctggtgatcgcggtttcgcagttgcgcatgcgcaagatcctgcgccagcgcaaggtcacggtgagcttccagatgtggctgtttccgtggctgacctggctggtcatcgcgttcatttgcgcggccttgacggtgatgctggtcacgcccgaacatcgtttcgaagtctcttcgaccctcgtgctgtccctgataatttccttgatcggcttgctcacggcgcggcacccggaacccacgcaaaaaccagtggccgcagtttcgcaatcatgagtggccgcccggtcagcagtatcgttttcctgctgctggaccagttcaccctgatgtcgctggcggcggcggtggagccgttgcgcatggccaaccagctctcgggccaggagctttacacgtggcacacggctagcccggacggcaacccggtgtgggccagtgacggtgtgccgatcacgcctgacggttcgatcctcagtgtgccctccgccgacattgtgttggtgtgtggcggcatcggcattcagggcaccgtgaccggcgaactggtcaagtggctgcgcggccaggcgcgttacgccaagcgactggggggcatttgcacgggcagctttgtgttggcgcgggccggcttgctcgacggctatgaatgcagcgtgcattgggagtggttggcggcgatgcaggaggcctttccacgggtgacggtcagttccagcctgttcagcctcgaccgcgaccggctcaccagttcaggcggcacggcgcccctggacatgatgctgcacctgatcggccgtgatcacgggcatgaactgtcggcggcgatctcggacatgtttgtctacgagcgcatccgcaacgagcaggaccaccagcgcgtacccctcaagcacatgctcggcacccagcagcccaagctgcaggaagtcgtggcattgatggaagccaacctggaagaaccgatcaacctggatgaactggcggcgtatgtcgcgctgtcgcgtcgccagctcgagcgcatgttccagaagtacctgcactgttcgccctcgcgctactaccttcgcttgcggctgatccgcgcgcggcagttgctcaagcagacaccgatttcaatcgtcgaattggccgtgctctgcggctttgtgtccacgccgcatttctccaagtgctatcgcgagtacttcggcgtgccgcccagtgacgagcgttccgtcacggacagcgagcggtccatcgtgctcaagccggcgttgcacacattgccggcgcccgcgccaatgaatgtattggagcaggcgcggggcgaggcaacgtttgccagtgtgaaaaacctgaagccctgaactcagcgcatatgcaagatgatcgggctgctgctcgccgggtcggtgtgcccgcgcaacttgctcaccgccttcacatccaccgcgccgccgttgttaccccaggtgccgcgcacatagctgagcacctcggcgatttgcgggtcggtcagttgctcacggaacgccggcatgcgataggcgtccggcacgccagccgtcaccacgcgttgcgagccgttgagggtgatgttgatggctgaggcgctttccttggccagggccgaggtggcgccggccaggggtggcatccattcgggctggcccttgccgtcaaggccgtggcacgaggcgcagcgggtcgcgtaggtgtgggcgccgggggtgtccgggttggcggcgaccgcctgatactgccagggagtgccgtcgcgctgtgggtcgccgggcagtgacttgaggtagcgggcgatggcggccaggtcgtcgtcctgcatgaactgcgtggagttgttgaaggcttcggtcatcgaaccgtagaccaccgcatgggcattgcgcccggtcttgaggaactgcacgatctgcgcctcgtcccagcggcccagtccggtgttggggtcctggcgcaggctgggtgcataccagccgtcgagcagggcgccggcaaggaacggcgcgccggcctcatccagtgctttctcgttgaaggccaggccgcgtggcgtgtggcaactgccgcaatggccggggccttggacgatataagcgccacggttccacagcgcgtcctggttgggtttggccgcgtacggcgcggtcggtgcgaacacgccgttccacagtgcgatgggccagcgcaggttgagcggccacggaatatcactggggatattcggctggttggccggttgcacgccctgcatgaagaacgcgtacagcgctttcatgtcgtcgtcgctgagcttgacgtaggacgggtagggcatcgccgggtacaaccgtcggccacccggtgccacgccgtggcgcaccgcgcggtcgaagtcggccaggctgtaggtgccgatcccggtggttttgtccggggtgatgttggtggcatggatcgcccccaacggcgtggccatttccaggccaccggcaaacggcgccttgcccggcaggctgtggcaggccacgcagtcgctgacacgcgcgacatattcaccgcggctgaccagagccggctcgaaggtggcgttggccggtgtttgtgcaaacggtgtagcggtctcacgggtgacgtaccaggccagcaggcctgcggcgaccaggcagggcagcgccagccagcctgcggttcttgcgaatcgacggttgttcatgggcatttcctgaaagtcagctgaaggtgtgtcggctcaagggcaggctgcgaacacgctggccggtcaattgcgccactgcattcgccacggctggtgccacggcgggcaacggtggctcgccgataccgcccatcttttcgccactctcgacgatccgcacatgcacccgcgccatctgcgccggcgccaggatcggatacaggtcgtagttgcgcgcccgtggcttgccgtccacgtacaccgcttcttccagcaaggtctgagacaagcccagcgccaccgcgccattcacctgcgcctcgacaatcgccgggttgacgatgctgcccgggtcaatggcctgccagatgtcgtgcacccttaccttgccattctcgatggacacctcggcgatcgccgccgtgtgcgaaccgaacggcgatgccatggccacgccgcgtgcgcgccggctgccgtcttcagcggtgaaggggccacgcttccagccgccggacagttcaaccgcggcgttcagcagggtggtcagccgtgggttgtcgcgcagcaggtgcaggcgcagttcatagggatcctgtttgcccttgtccgccagttcgtcgaggaacgattcatagaaaaagtcattcagcgaattgcccaccgaacgccagtagccgagcatgggcgcgcctttgacgtagatctgcgcgatgcgtttgttggggatggcgtaggacttgcccgacaatccttcgaccgccgtggggtcgatcttgtcgccctgtttgccggcgagggcttcggtcgggccttcggtggcgcttaccgcttcgatggccaccggcaggcctttgtcatccagtgcggcgcggaacttgaccacggccaccgggcgcaatacatcgcgcaggaactcttcctcacgactccagatcagcttgaccggacggcccaccgccttggcgagcgcgatggcctgcgggtaggggttggccgactcatataggaaatgccggccgaaaaagccgccgagcaacggcgagtgcaggttgatcttcgctgcgtccaggccggtgcgcttggcgatgtcggtgcggaacatgtccggcgcctggttgggcagccagatatccaggctgccgtccgggttgaagcgggccagggcggagggcggctccaactggccgtggttgaggtactggttgtgatacgtcgcttcgacctgggtcttggcgcctttcagcgcggcggccacgtcgccttctttctcatcgtcacgggccggcccttgctgggcggcgaggaactcgaaatgcttgtcgctggagaagtccgccggcatcacgcgcagcgtcgagtcggcggccgcttcctgccagtcgacctggaccgcttccaccgcacgcttggcgtgccaccagcgttcagccaccaccgccaccgcaccgggcagtacgtgcactgaatgcacgcctttcatgccttcgacctgtgtctggttacgcaggctgcccacggtcatgcccaggcgtggcgcatgctggacggcggcgtgaagcatatcgtcgactttcaggtcgatgctgtagagcgccttgccagtggatttgtcgtaggcgtcgaggcgcttgaccggcttgccgatccagcggaactggctcggatcgcgcagggtgatgctggcgggatcgggcacgggcatgtcgagggcgctactggccagttcgccgtagcccagcgagcggcccgatgctgcgtgcacgactcgaccaggctgggtggtcagttcgcccaccggcacgccgaattgtttggcgccggcctgcagcaacatcgcgcgggcgagggcgccgaggcggcgcatggtcgggtagctcatgcgcaccgacatgctgccgccggtgatgcgcaggccgttctccatcaccacataggtttcgccgggcggcgcggcctcgacgatgaaagtggcggggtcggcatccagttcttcgccgacaatctgcgccatggcggtgtgggtgccttgcccgccttccatgaaggggctgagcaggcgcaccgtgccgtccgggcgaatctccagaaacgccggcacctgggtaccgcgttcagcggcagtggcggcttgcacccggcccgagcccagtggcaggccgaaaccaatgaccagcgcgcccacggcggtgctcgccagaaagcggcggcgtgacaggttgaccggtgcatcgagcagttcgttgaggatgttcattacgcgccctcctgcttggccagggcatcgacggccgcatggatggcgttgtacgtgccgcagcggcacaggttgatcatggccgcgtcgatctgcgccttgctcggtgcgggggtgtgcttgagcagcgccgtggccgccatcacctgcccggactggcagtagccgcattgcgccacctgttgctcgacccaggtcgcgaccacacgcttgcccacctcgtcgtcttcaatcgcttcgatggtggtgatttcccgcccgaccaccccggccaccggcgtgacgcaggagcgcaccacattgccgtccaccagcaccgaacaggcgccgcactgggccaggccgcagccgtacttggtgccggtcaggcccaggtcatcgcggatcacccacagcaatggggtgtccgcgtcggcatcgacctgataggccttttggttgattcgtaattccatggctcacctgctgatcatcggtaggtgcggcctgttttaggtgtgaacgcagtggccgcttattgtcgaactctagaccagcgcgcaagggctatctatccgttaatcgataagtcggaggatcaggcaagtattcaagagaaatgggccagtctggtgttatcgaggcggcgattgatccaggtcaatgcaaggtcggatcggcgggcatgaatgggcagggcgggcgtagagcgggttgtagcggtgatatcatggcgccactattctggcgcggtgcgttactgcgacccatggaaatgaggctttaggcaaatgctcaagaatgcaccactgcgtctgaaactgttgttgatcctgctactgcccatgctcgggttcctgacgttggccggcgtgttcgtggtggacaactacaagacgctgcgcgacatggacgcgaccgtgacggccagcgccaccgcgcagaagctgagccgactcattaccacgctacaacgtgagcgcggcgccagcggggttttcctgggcagtggcggccagtcgatgggcgacaggatgttgcagatgcgccaggactccagcgcggcggtcgaggtggtacgcggtttgacggcatcgggtggtgcgagcctggatggcgtgctgcgtgccttggaccaactgccggcaacccgtgggcaaatcgacaaactgagcctcaatagcaccgagtccggcgcgcgttacaccgagatcatccaagccctggtcgggtatacccattccctggaagccagcgtcaacaacgcgaccctggtctatgccctcggcgccttgaaccaattcatcgaaatgaaagaacgcgccggacgcgagcgtgtggtgttggggctggtattcaaccaggaccactttgatgcgacgctgctgtcgcgcttcagccgcaacctgggtgagttcaatgcctactacgatgcgttccgccgcaaggcaccggtagtcacgcttcaacaattcgatgagcacatgcaaaaccccgccgccgtggaagttggcaggttgcaacgcctggcgtttgaagtgccgatggggcaggcgctgggcatcaggccagaggcgtggtttgaaacctccacccgccgcatcgacctgatgagccaagtggaagaagccctgggccaaagtgtcagcgacctggcgaagcatgagcgcgatgccgccagtcgtgccctgtggttgaccattggcgcggtggttgtggccctgttggcggtcgtggtgttgtcctggctgatcatccgcatgatcggttcggcggtgcgcgacctgaaccgggtactgaacgacctggcgcagcgcgatctcacggcacgggcgacgtaccagagccgggacgaattcggccagatctcacacaacctcaaccgcatggcgcaagagatcagtggcgtcgtgcaggaaatcggcaacgccaccgcccaagtggcgacggcggcggaggagtcctccacggtcacgatccagaccagccagagcgtcgagcagcagcgccagagcaccgagctggtagcgacggcgatcaaccagatgagcgccaccgtgcgcgaagtggcgcacagcaccaacgatgcggcgcagatgtcgcagcgggtcaataccagcaccgcacaagggcgtgccgaaatagaaagcaccatcgcgctgatccgtcagctctcggggcaggccgaggaaaccgcgctgatcattggtgatctgaaacaggaaagcgacggcatttccaccgtgcttgacgttattcgcggcattgccgagcaaaccaatctgctggccttgaatgcggcgatcgaagcggcgcgggccggggaccatggccgtgggttcgccgtggtggcgtccgaagtccgtgtgcttgcgcagaagacccaggagtccacgggcagcattcagcagatgatcagcaacctgcagaccggctccgaccgtgcggccacgtccatgcaggaaaccctgggcaaggcgcaggacggtgcgagcaaggtggaacgtgcgggtgagttgctgcaagagatcgctgaaggggtgtcgggtatcagtgatcgcaacatgcagatcgcctcggccgccgaagagcagagtgcggtctcggaggacatcaaccgtaacgtcaacgagatcaatgacctggtgatccaggtcagtgccggggccgaacagacggccgttaccagccaggagctggcgcgcctggccgagcagcagcaacgtctggtcaatcggttcaaggtggcctgatcgattggcgcacagcacgccctgccgaatgcagccacctgcgtcacagggcgttggttaagcgaaatcttcctcgaagtgttcccgctcacctcgcgtgtcgccctggcgccgcaccacctccatctgccgcagttccacgcggcggatcttgccggagatggtcttgggcagttcgctgacgaactcgatacgccgcacccgtttgtaaggcgccaggtgctcgcgggcaaaggccaggatgtgccgggccagctcggcgtcgcccggcgcatcatgggccaggatcaggaacgccttgggcaccgccaggcgcaacgggtcggggctcggcaccacggccacttccatgaccgccgggtgttcgatcaaggcgctttccaactcgaacgggctgatgcggtagtcggacgccttgaacacatcgtcggcgcgcccgacgaaagtgatgtagccgtcggcgtcgacctgcgcggtgtcgccggtgcggtagtagccgtcgcgcatgacctcggcggttttctccgggctgtcctcgtagcacagcatcaggccgagggggcgcacatccaggggcagggcgacttcgccttcgctgcccggaatgccgtccgggtcgagcaaggccacctggtagcccggcagcgggcggcccatggagccgggcttgagtacctggcctggcgtgttgcccaccagcgcggtggtttccgattggccgaaaccatcacgcagcggcaagccccaggcgtgctggatctgctcgatgatttccgggttcagcggctcgcccgcgccgaccagttcgcgcaggctcaggcgtgatttgtagctggcgagatcctcctggatcagcatgcgccacacggtgggcggcgcgcacaggctggtcacgccgtagcgttccaacgcactgagcaaggccggcgcgctgaaccgtgcgacgttatggataaagatgcacgcgccggcattccacggggcgaacaggcagctccaggcatgcttggcccagccgggtgacgagatattaaggtgcaggtcgcccggctgcaggccgatccagtacatggtcgacaggtggcccaccgggtagctctggtggctgtgcagcaccatctttggcttggatgtggtgccggaggtgaagtagagcagcatcgggtcggtggccagggtgcgaccttcggcctcgaagtgctcggggtgttcgaaggcggcgctgtgggccacccaaccttgcggcgccgagcccacgcagacgcgactgcaaccgtccgccagcccgacgaatttatgcacgtgggcttcgccgaccaccaggtgacgcacctgcccgcgttcgatgcggtcgcgcaggtcgtcggggttcagcagggcggtggcggggatgaccacggcgccgagcttgaacgcggcgagcatggtgtcccacagcgccacatcgttgccgagcatcaacagcacccggtcaccgcgacgcacaccgagggcgcgcaagtggttggccacctggttggagcgcgtggccagttgctcgaagctgtagcgctgctcactgccgtcttcttcgacgatccacagtgcatctgccgcgttgccctcggccattgtgtcgaaatagtccagggcccagttgaattcgtccagttgcggccaacggaaatcccggacagcggtggcgtagtcggtgcggtgagcgagcagaaaatcccgagcggccaggaagggctgggtcatggtggctgtccttaattattgttgtggggactgaccccccggctggaccgagaggctggaccgagtataggcacgcataaatcagagcagaacgctcaaaaacaccggtgcgttgtgcaaaaaagtcatgggtgttgcgccaggcagcagtgagattgacggttaagacataaaagtccaagatggaattataagtacaaaaacatgcgattcatctctttcccactcttgccaaaccaacaacaacttgcgagaacccgatcatgaagaaacgctccctcgtcaccgtcctggccttgagcctgcttgcatccggccccttggccgccgccgagaaaaccctgcgcatcggcatcgaggcggcttacccaccgttcgcgtccaagaccgaggaaggcaagatcgtcggcttcgactacgacatcggcaatgcgttgtgtgcgcagatgaaggtcaagtgcgtgtgggtcgaaggtgagttcgacggcctgattccttccctcaaggtgaagaaaatcgatatggcgctgtcgtccatgaccatcaacgaagaccgcaagaagtcggtggatttcacccacaagtattacttcacctcatcgcggctggtgatgaaggaaggcgccgtggtggacgaccagtacgccagcctcaagggcaagaccgtcggcgtgcagcgcgcaaccaccacggatcgctacgccaccgaggtgttcgagcccaagggcatcaacgtcaagcgctacaacaataacgaagagatctacatggacctggccgccgggcggctggatgcgatcttcgccgacaccatccccttgaatgacttcctgcagatgccccgtggccagggctacgcgtttgtcggcccggaactcaaggacccgaaatacgtgggcgagggcgccgggattgccgtgcgcaagggcaatagcgagttggtcagccagttgaacgcggccatcgacggcattcgcgccagtggcgagtaccagaagatttcgcagcagtacttcaaggccgacatctacggcgactgacgcccaggcaaactcgatcaatgtgggagggggcttgcccccgatagcggtctttcattgccagatgtattggctgatgcagcgccatcgggggcaagccccctcccacatttgatttacagtgttcgatcaggtttttaattctttcaaatgcttgtagaccgtcgcccgccccatgcccagcacattggccacatagttcgacgcgctcttgcccttgaacgcgccttcggcatgcaacgccagcaccagctcacgcttgtggtcgcgcgtcagcaaattcaggctcaactgccgctcgcgcaaccacgcatgcaaaaacgtgttgatgcgttcctgccagtcatcacgaaacaacgcgtccggctgcgggatcagcttgctcggcgacaggaacaagtccagcgccgccttggcgttttcaaacagtgaaatattcaggttgatgcacagcaccgccaggcgtcggccttggtggtcgtgcagcacggtgctcaggctgcggattttctgaccgtcccagttgagcttttcgtacgggccgatattcacctcgctgacgtcggcgtcgagcatgtcctccagcgccgagtcatcgccgatgctgcgcttggacaggttgttggcgatgtaatcgaccttttgcgagcgcaggtcatgcagcaccgcttcggcgtgggggaagaacagcgtggcgatggcgtcggccattgcgcggaagttctgcatgacggtgtcttgttcagcggtgttcatcaatggggctccaggcgggcaggggagagcataccagcgtcgaggccgaagcgtgtcagcgcctccggcagcgctgcgccgcgcaccagtgcggcactggcctggcccatggccggtgaggtctggatgccataaccgccctgtgccgctacccagaacaggcctggtaccacggaatcaaaacccgcgagcaaatcaccgtcgtgcacaaagctgcgcagaccggcccaggtgcgggtcgggcggcggatggtcagggtcgtggcttcttcgatctggtagatgcccatggcgatgtccagttcttcaggctgaatgtcctggggggcgaccgggtcggcgttggccggtgagccaaggaacatgccggcgtcgggtttcatgtagaaggattcgtccagcgccaccagcatcggccagtgatgactgtcgacgccgtcggggccggcgaagatgaacgccgagcgccgcttgggctgcaagccgatggacgcggccccggcgagcccgccgatgtgatcggcccaggcgccggcggcgttgatgatgatcggcgcggtgtaggaggcgtcctgggtttgtaccagccagatgccgtcgccgtcgcggctcaagccgagcacgtggctgtcggtacgcacctcgccaccgttgcgacggataccgcgcaggtagccctggtgcagggcgtcggtgtcgatgtcactggcggtggggtcatacagcgcaccgtgaactttttcgcggcgcaggatcggcaacttcgcgcaggcctggtcggcgctgagcagctcgacctgggccacggtggccttggcactctggtattgggtgttcagctcggctgcatcaccgatgaagtccacggtcatttcgccccgtggcgtgagcaacgggtgttcgcagaaacccggcggcgggttgtcgaaaaacgcccggctggccagggtcagcgcccgcacctgcggggtgccataggcggcgctgaacagtgccgccgaacgcccggtggagtgataggccgggtggctttcgcgctccagcacgagcaccttgccgtgctgcgacaaccagaaaccggtggaggcgccggcgataccgccgccaatgatgatgaaatctgcgtggttcatagctgtctccagagggcattggccagggcgatgtcttccaggcccaggccgatggagcggaagaatacatgacggtcgtaggtcggaggttgcacccattcgctgagcagttcgggcaagtcccccacgatggcacgcgggtcccacccgtgttgttcggtggcgatcagcatgtcacctgccgcgctaggggtggtctggcgatagtcgcagaatacctgcatcgcgttgaggctgtgcggcggcacttcgtgggcacgcggcgcattggtgctgatcgaggtgatcagcgccggtttgctcaagcgggcggggtcgagcaccggtccggccgacgaggtgcacagcaggatcacatcggcgtcgtccacggccgcatcgcagctggcggcgatgaccacccttgggtccaggcgcttgagttgggtgatagcctcggcgctggcgttggccaggctcggcgaaaacaggctgatgtgctgccagtcacgcagttgtttgacgtagtgcacatgcgcctgcgccaccttgccactgccaatgatcgccaggcgccttgcggataatggcgccaatgcctccaccgccagggctgtggttgccgcagtgcgggccgtggtcagttcggcagcatcgcacagcagcaggggttggccggtctgcatcgacatcaacaaggtccaagcggtcaccagcggcccttgctcacgcacgatatagggcgaggtcttgaccccgtacaccccatcctcggccagcacgcccaggtagttgataaagtcaccggcggcgcgtggaaactccaccagctgctgcgccggctgcacggcttgcccggccgccaggtcctggaacagcttgcgcaggatctgcggcacatcgacttttccgagcaattcgcgggcctgggcctggtggatcatatggggtgtgctggacatggggatctccgcaagtaaactaatttgtccattatggacttttagtttctttgggcaagcgtaaaagatcaccccgtaaagcgaaacccacccgacaattcagttttcagaaaccccaccaacgcactcaccgccttcggcacatggggcgaatacggtcgtatcaaatagatctcatcggcaaacgcgcccttgagcgtccagcccttgagtacctgcaccagcttgccgctggccaacgtggcgtgggcgctgaagtcggggagcagggcgatgcccaggtggttgagggccgcatcgcgcagggcttcgctgttgttggtggcgaagctgccggcgatgggcacggtcacacgctcgacgtttttgctgccgcgctcgaaggtccaggcgggctggtcggtgccgcgtgggtagaacaggcagttatgggcgcagaggtcattgggttcgcgcggttccccgtggcgttgcaggtattcccgggtagccaccagcaccgagccggtgtcgcacagcttccaggccacgtgggtttccggcacctggaagccgtgacgcacggccaggtcgtagccttcggcggccagtgaactcagggcgtcggacacgtccagctgaatgcgcacctgcgggtactgttgcaggaattccgacaagtgcggcaccaattgctgacgggcgaacgccactggcgcggtcagccgtaccagcccgcgaatctcgccgaccgagtcgcgtaccgaggagaagctgcgggcgatctgctcatacgcgctgcgcacttcacgggtcaacgacagccccgcgtcggtcagcctgacgctgcgcgtggtgcgggtgaccagtcgcgtgccggtggctttttccaggtcggaaatacgctggctcaccgccgacttgctcacgcccaggcgtgcggcagcggcggtgtaggtgccttgttcctccagcaccgacagccagtggatgtgcgtccacagcccttcgatctcggatttttccatgggtgcattgttcgctatggtggacaattagttctggattctgctctggtttggaacaaaccgaaagcctatcgtggtccccaacgctatccacctgggatccactgccatgaccacgaccatcgagcactacatcaacgaccagcgcgtgtcccgcgacgatcgctatcaggacgtctacaacccggccaccggcgaaaagaccgggcgcgtcgccctggccagccgccagaccgtgtccgaagccgtcgccgctgcccaggccgcgttcgccggttgggccgacacgccgccgatccgccgtgctcgcgtgctgttcgaatacctgcacctgctgcgcgaacgcaaggacgacctggcgcgcatcatcgtcgccgaacacggcaaggtcttcaccgacgcccagggcgaagtcgaccgtggcatcgacattttggagttcgcctgcggcatccccaacctgctcaagggcgagcattccgaccaagtgtcccgtggcatggacaactggacgatgcgccaaccgctgggcgtggtggcgggcgtgacgccgttcaacttcccggtgatggtgccgatgtggatgtacccgatcgccatcgcggcgggcaacaccttcatcctcaagccaagccccaccgacccgagcgcctcgctgttcatggccgaactgctgcgtgaagccggcttgcccaaaggcgtgttcaacgtggtgcagggcgacaaggaatcggtggacgcgctgatcgaacacccggacgtcaaggccgtgagctttgtcggctccacgccgattgcccaatacatctacgaaaccggtgcgcgcaacggcaagcgcgtgcaaggcctgggcggcgcgaaaaaccacatggtggtgatgcccgacgccgatatcgaaaaaaccgccgacgccttgatgggcgccgcctacggcagtgccggcgagcgctgcatggccatctccgtggcagtgctggtgggcgatgtgggtgacaaagtcatcgcggcgctgaccgaacgcgccaagcacctgcgcatcaccgacggtcgtgacctcaaggccgagatgggcccgattgtgtcccatgccgccctggaacgcatcagcggctacatcgaacaaggcgtgcaggccggcgcgcaactgctgctcgacgggcgtgactatgtgccgactgaggctggccttgaaaatggcttctggctcggtgcgaccctgttcgaccacgtgacccgagaaatgagcatctaccgcgaagaaatcttcggcccggtactggcctgcgtgcgtgtgaatgactttgccgaggcgatcaagctggtcaacgaccacgagttcggcaacggcgtcagctgctttacccgcgacggcaacatcgcccgcgaattcgcgcggcgcattgaagtgggcatggtcggcatcaacgtgccgatccccgtgccgatggcctggcacggctttggcggctggaagaaaagcctgttcggcgacatgcatgcctatggcaccgagggcgtgcgcttctacaccaaacagaagtcgatcatgcagcgctggtcggaaagcatcgagcagggcgcggagtttgcgatgccggtgtcgaagtaagcgccgacccgaccctcattgagcgatccacacgctgacgcacaacccttgttgcgccagcgtgtcgctgaatgccaactgtactcggcaaccggtacgctcgctgatcgccttgacgatcgacaagcccaagccggagccggcttgctccgagccgaggctgcgatagaacgggtcgaacacccgcagctgttcctcctcggcgatgcctgggccggtgtctttgacttgcagcagcacgccaccttcaatccccttcaccgacagatcgatacgcccgccttgcggggtgtagcggatggcgttgtccactaggttcttgaccagggtgaacaggtccagttcgttgaacagcacctgcacgtcctcggtgctttcgacgccgatatcgatctgcttgcgctcggccaggggcagtaagtcttccagcacctgtcgataaaggccatgcaccgacagcggcgtttgcacccgcgttgacggcgcttgcgccgccgccagcgccaacagttgatcgataaggttgcgcccgcgctcgataccccgggacagcggcaaaaaccgctcgcggctgaccgctgacaagtccgtcgcggccaggcgttcggcttgcagcgacagggcggtcatcggtgagcgcagctcatgggcggcgtcggcgacaaagcgacgctggctgtccatggactggccgacgcgggccagcaggcgattgatggcgaccacgaacgggcgcacttccgtgggcagatgctgctcgtcaatcgggtgcagtgcctgttcgtcgcgctggtcgatctcggcggccagtacgccgatggggcgaaacagtttgcgcaccaggtcgcccaccaccagcaacagcacggggaacaggatcaggaacggtagcagactgcgccaggcgctctcgcgggcatccttgtcgcgggcgtcctgttcctgggccacggcgatacgttcgccctttgaggtggtgtgcaccagcacccgaaaggcttcgccggccacttgcaccgtggcgaggccatcggcgagcgtggtggggaacggcaggggcaacgcctcgtcactgccgcctgtcgcctggttgccatcgcccaggtgctggatgatcacccgcgattcttcatcatcgccgtcaatcgccttgccctgggggtagtgcagcgtcatctgttggcggtcgaacagcatggccacctggcgcaaggtggcgtcctgttgttcgtgggcttcatcaaaggccgagacaaacgcaaacacgctggccagcagcgccaccaacagaatcgccagggacagcgtcaccgagaggcgcagctgcaccgactcgctcaaacgttttttgaaaccatccatcccatgcccctgacgttcttgatcacgtgactgcccaacttgcgccgcaaggcgtgaatcaggaactcgatggcgttgctttcaacctcattgccccagccatacaggcggtcttccagttcgctgcgtgacaggattgctcccgggcggatcagcaaggcttgcaacagcgcaaattcacgactggacagggccacgccacgcagttcctcggtgctggcttctttggagagcaggtccagcgacaccacgccgttaccgagcaacgacgacgcgctgccgcctttgcggcgcagtacggcgcgcatgcgggcgagcagttcgggcatgtcgaaaggtttgagcaagtagtcgtcggcaccgccatcgaggccacgcaggcggtcatcgaggctgtcgcgggcagtgatgatcagcagcggcagcgcgttgttgcgcgcacggatgatctccagcacttgcaggccgtccttgccgggcaggccgaggtccaacagcaccaggtcgtaggggtgggtgtcgagggcggccagggcggtgaggccgttcttgacccagtcggcggcgtagctggcgtcgctgagggcgcgctggatcgcatcgccaatcatggggtcgtcttcgaccagcagtatccgcatatccctctccgaaaaaaacgcggcgagatcatcgccgcgtctgtattgaagcatctgggcagacatttgtccggcatcagcccttcatcgtatcgaaggccttgagcaggtcatccatcgcggccttgcagtcggcctggttcgggctgcctgcgcgcaacgcctccagtgcgcggtcgatggctttatccagcacatgccagtcactggcggcgcggggcttgattccggcttcagcggagtcccagctggtttccaggtccttaatgcgggctttggccgcgggcaggtcgttcttggcgacgagggccgatacgtccaccgcgatgttgcggaactcggacaggtcgcccagtttcgacgcctggtgttggctggcggcggcacgggtggtgtccttgggcttatcggcgggtttggagcagccggtggcgatgcccagcatgaagatcgcagaaacaatggcgacgcggcggatcaggtgttgaacagggcgcatgaggatttccttgagtgggttgttcatgaggtgatggctttgcggttgccgacgctcagttgcgctacggcgaccagcaggacaatgacgcagaggaacagcgcgctggtccaactggcgcccatacccaggccgccgtaggtcttggcttgggtgagcaggtcgccgagggaggcgccaaacgggcgggtgaggatgtaggcgatccagaaggtcagcacactgttgacccccaggcgccaggccaccagggccacggcgatcaaaccggcgaagatcaccgcgccgagggtgaagcccaggcccagtgcttcggtggccaggtcgccggcggcggtgccgagggcaaaggtgcagagcaccgtggtccagtagaacccttcacgccgaggagtgacgatgtcgcggatcgacaggctgcgttcggtacggaaccagaccatgaagttgaggcccagcagcaccgagaaaatcgccgtgctggtgtacaggctcacgtcgagtttatcggtgagaatgtcggtgatctgcgtgccgacgatgctcaccagtactacggtgagccagtagatccatggggtgtaggctttggtgcgcagctgcaagcacagcgcgcccgccagcagcgcggccatgccgaggctggtccagccggcgccgaaaccagcgtcgacggcgaggtagtccgcgccggtttcgcccacggtcgtggacaggattttgatcacccagaatgacagcgtcacctcgggtactttgttcagccaacgggctgctgtggcattcatcgggttacctctccttgatggcgcggcggtgggcgcaggagagaaggtaaaccgcgaaacttagctgggactgagggccgctgcgtttttacagcacatgggccaaacccagcgtggtgaggtgcaccacgctgcccatgttcggcgcatgcaggcccgaactgcgcaccaggatggcttggccgggcacaccctcatccggttgcaacgccacggtcagggtgcaggtgttgccaccgaattcgcgctcggtgaccacgccacggcaaccggaatcgtcggtggtgctcaggtgcagttgctccgggcgcagcatgatgcgtgcagcaccgtgattggcctggcggtcgaccgacacacgccccaacgcgcagtgggcccagccgccctcgatttgcgcgggtatgactacggcctcgccgagaaacaatgcggtctgttcgtccacggggtactggtacaggtccatcggatgccccgattgcaccaggcgcccctggcgcatcaccgccaactggtcggcgaacgacagcgcctcactttgatcgtgggtcaccagaatggtggtgatgcccgcatcgctcagcagccgtgcgaccatcttgcgcatggccgagcgcaggccggtgtccagtgccgaaaacggttcatccagcagcatcagccgcggctgttgcgccaacgcccgcgccagcgccacccgttgctgctggccgccggacagttcgtgaggccaacgttgggccatgttggcgtccagggacacgctgtccatcagctcggcgatgcgttcgtgccgcgtggcgtgtctggtggcaaggccaaagccgatattgtcggccacggtcatgtgcgggaacagcgcgccgtcctgcggcacataaccgatctggcgctggtgcgcgggcacggcgtgggtggcgtccaccagcacctggccgttgagggtcaggctgccgctgtcggggaattcaaaaccggcaatcatgcgcagcaaggtggtcttgcccgagccggatggtccgacgatcaccgtgcggctgccgttgggcactgccaggctgacgtcggccagggcgcgcagggtgccgaaggtcttgcagagggcgtggagttcgagggcgttcatcggcctgccgtgcgtttggattggtggtaaaggaggccggtcaacggcagtgagagcaggatcatgatcaacgcgtaaggtgctgctgcggcgtagtcgatctcgctggtcatcgcccagaagccggtggccagggtgcgcgtgccgttgggggcgagcagcagggtggcggtcagctcgttggtgatcgccaggaacaccagcgccgcgcccgctgcggcagccggagccgccaggcgcatcgtaatcagccacagggcgcggcccggcgagcggccaaggctgcgcgccatgttttccagctccacaggcgcctgggcgataccggcgcgcaggctgactagcgcccgtggcaggaacatcagcaggtaggcgagcaatacggtgatggtggtctggtagatcggccgggcgaagtggatagtcaccgtgaccagcgccagcgccacgacaatgccgggcaacgaactggtgatgtagttgcagctttccaaaatgcgttgcaggcgccccggtgcacgaatcgacagccaggcaatcggcaccgccgcgcaagtggtcaacaccgcaccggcaatacccaacagcacggtttgttccagtgccggcagcaactcgctgaactgccagacctcgcgaccaccggcgatcagccatttgcccagggtgaccagcggcacgccgagggccaaggcaccggtcgcggcttgcaagccgagggcgagcagggtggttgcggggctcagccgcacgatgcgttgctcgcgggcgctgccggaaccgacccgcgcataacgtgcatggccgcgagcggcggactcgacgctgagcatcgccaggcaacacagggccagcaccgccgcgagcatattcgccgccgggccgttaaaggtggatttgaactgatcgaaaatcgccgtggtgaaggtgtcgaagcggatcatcgcgtacaggccatattcggccagcagatgcaggcccaccagcagcgcaccgccgcagatcgccaggcgcaactggggcaacaccacgcgccagaacaccgcccagggcttgaggcccagggactcggccacgtcttcaattgcagggtccagccggcgcagggtcgccgccaccggcaggtacagaaaggggaaataggcaatcaccgacaccagcacgccagcgggcaagccatggatcgacggcaccaggctgacccacgcgtaactgtgcacaaacgccggcaccgccagcggcgcgaccgccagcaacgaccaggcgcggcggccgggcaggtcggtgcgctcggtcaaccaggcgagcgcgatgcccaacacgatgcacaacggcaaggtgaacagcaccagcagcacggtgttggtcagcaactcgccgacgcgcgggcgccagaccagcgcttcgatctgcgcccagccgatttgccacgacacgccgattacaaacgcgatcggcaacagcgccaacaacgaaaccagcaccgacaaaccggtgacccaggtgcccccacggcttttgaacaggctgtgggggcgtttgcgtggcggcgcgtgggcgatgccgggaatcgacgattcaggcagcaatcagagcagtccggcctgggtcatcaactcgacggccttcttgctgttgagcttggacgcgtcgaccttgggggcatccagttgtgccagcggggtcagcttggggttggattgagcgttctcgccgaccgcgtattcaaacgagttaccgtccttgaggatcgcctggccgtctttgccggtgatccacttcaagaaggcctgggcctgctcctgatgcttgctggaggccaagacaccggcaccggagatgctcacaaacgcgcccgggtcctggtgcttgaagtagtgcagttgggtatttttgctgttttcgccggtcttggattggtcgacgaagctgtagtagtgatagatcacaccgctgtcgacctggccggcgttgacggccttgagcaccgcgctgttgccacggtagatgctcgcgttggccttcattgccttgagccagtcaagggttgcggcttcgcccttgagttcgagcacggcggcgacgatggcctggaagtcggcaccggccggtgacgcggcccagcggcctttccagctgggcgacgccaggtccagcagggatttgggcaggtcggcttctttcaatttgctcgggttgtacacgaacaccgtggagcgcgcagcaatgcccacccatttgccatgggccgggcggtaggcggcgtccacctgttcacgcgtggtcggcgcgaccggggcgaacaggcccgcattgtccaccagcaccatggccggggagttttcagtgaggaacacatccgccggcgaggccgcgccttcctgcacgagctggttgcccatctcggtgtcgtcgccattgcggatggttaccggaatcccggtttcctgggtgaagccttcgacccacgccttggtcaggctttcatgctgggcgttgtacaccacgatgccgaccggctcgctggcggcatacacatgcccggcactgaccagggccgtggcgagcagggcttgtttgacgaacgaggggaggcgagtggtcatgcggtgagcgctccggggttttttgactgcacgggaaatccgcgagaggtcgattgagagtagaccaataggaatcatttgcatgttggggcgcggcgaatgtagagctgggaatgagaaaaaaacgtcaaaaatacagttaacaaatgtgatgagggtgatcaggcgtagcaggccaaaagcgggaggtggtttggttgtttttcaacatgagggttgacggccaaggtaatgccgaatactgtacataaacacagtgtttagcgctgaccaaccaaacctcggcaacctcagccatgccaaacactgtgtgcaagttaacggattaacttgatgcacaggctcgttttaccgagccatttttattgatagagagggaactcatgtcctacccagaaagcaaactcaccggtctgatcggtttcgcccaagccgcaaaagtgacaggtggctggtccggccctgtggtcagtatcaccacgctcgatcaactcaaggccaatatcggcgacaccaccccacgggtactggtgatcaacagtaatatctcggcgtcgagcctgaccaaagtcaacatgggcgccaacaagaccctgattggctcgttccagaaccgtaccctggagaatattcacctgcgtgcaacggcgcagtcgcagaacatcattctgcagaatcttatcttcaagcattcggcaagtatcaaggccaatgacgatatccaggtctacttgaactacggcagcaagtattggatcgaccattgctctttcgtcgggcacagctggtccaccactgacggtagcgaagataaactactgtatatcggggaaaaggccgattatgccaccatcagcaactgtttctttggcagtcataagtatggtctgatcttcggtcacccggcggatgataacaatgccgcgttcaatggttacccgcacctgacgctgtgccataaccgcttcgacaatatggaagtgcgtgcgcctggcttgatgcgttacggttattttcatgtgtacaacaactacatcaataacttccacctcggttttaccctggcacaaaatgccaacatcctttctgaaagtaactactttggcgaaggcagccaaaataaaggcatgttggatgacaagggcaacgggaccttcaccgacatcaacagcgtgccgccaatcactaatcagaagtcgcccaaggcgcagtggacggcgtcatccaactatggctataccttgaagaccgccgcacaagccaaggattttacccagaagaatgccggcgcccagtcggttgcactggtctttggtagttgattagctagctttctacttagtgctcacttaataccggtgccactgtatttatatcaaggatataaatacagtgatggcctttataatctaaataattcttcatgttgcgacaggcaggcttccatgttaaaccttgtttcgcacttgcagagccaactatcccttgctctttcagccactatcaagttgttggctgtcatgtgctatttaatcttcgcttgtcacttaagcgtcagcaaaaggacatcatcatgaaacatgcgaatcacacacccactcgctggacacgggccgatgcgctgaaagttaatgagaatgacccgacgacgacacagccgttagtgagtcctgactttcctgtcatgagtgacacggtctttatctgggacaccatgcccttgcgtgaacttggtggtacggtggtatcggtcaatggctggtcagtgatcttcaccctgacggctgatcgtcgcccccatgatccacaattcatcaacgccgatggccgttacgacatcaagcgcgactgggaagaccgccatggccatgcgcgtatctgctactggtattcgcgcaccggcaaggactggatcttcggcggtcgtgtcatggccgaaggggtttcgccgaccacgcgggaatgggcaggtacaccgatcctgctgaataacaacggcgatatcgacctgtattacacctgcgtcacaccgggcgccaccattgccaaagtcagggggcaggtggtcacctcggataccggcgtgaccctgcggggctttgatcaggtcaaatcgttgtttgatgccgacggtatctattaccaaaccgaagcgcaaaattcgacttggaactttcgcgatcccagcccctttatcgatccaaaagatggcaggttgtacatggtgttcgaaggcaacgttgccggcgagcgcgggacacacgaagtaggcccgaatgaaataggcctggtgccgcccgggcatgaagatgtcggcggtgcgcgttatcaggtcggctgcatcggcattgcggtggccaaagacctcaacggtgacgagtgggagattttgccaccgctggtgaccgccgttggtgtgaacgaccagaccgaacggccgcactatgtgttccaggacaacaagtactacctgttcaccatcagtcacaagttcacctacgcggacggcgtgacgggcccggatggcgtgtatggtttcgtcagcgaccggctgttcggcccttacacaccgatgaacgcctccggcctggtgctcggcaatccgccttcgcagcccttccagacatactcccactgtgtaatgcccaacggcctcgtgacatcgtttatcgacagtgtgcccaccactggcgatgactaccgtatcggcggcaccgaagcgccgacggtcaggattgtgttgaagggcgatcgttcgtttgtgcaggaggcttatgactatggctacatcccggcgatgcgcgatgtagtgttgagccagtgactgccgtgcaatcgtcagcctgatcatctggtgtaaaccgatgcaaaagtgggagggggcttgcctcctcccacttttttaaccgcaatccagttcggtggccgaagcactgtcgagcaagctggcggtgtagagcagggtgtgtcagtgcgagcatgtttaattgatgaataaataaactaatggatggtttaattggtgatgggaatttccttcggatggtattcgtcttacaaacgcagcctacagtattatcggtaggacttagttgctggtttgctggcggtttttttttatcgtgcaggaacgctctacagtgagcgtttaagatgtgtgataaaaaatcatgaggtgttttggcttgacaaatttatgtgcggataaataatttaatcgcttgctttaaaaggtgtgaaatcatttttttataaaaacaaggatgaaaatgatggatgctcaaaattcagtaaaaaacagatcaaatgaaaggctctctaagaatgagatttatagagtgtgcgaggccggttacaacgaggtggctaatgcaattgtccggcatgccgcgcttagggaacttgaaaaattcggcgagattatctctgctcgtcctctgacgcatcagggtatggccttgttttttggcaccctttgggctttttttaaagacgtgcctgcgggaatcgttgcgttggctgcacgtgttacggatgaatggatcaaggaggatatgtggaatggcacagccaaggctgcgcatattctttatgcttcggttgatgagtatggtctgcaccagcatagtaaacatatgctgcctacccatcatcagatgtttaaacaactgacgactcatctggggctttccgatgctgatctgtttaatccgtctaacgtactcccagagggtactgcgatggggaataacacgcataggatgtaccgctccgagtttttgggcgaagcgttgggttttcatttggcttcggaaatgacctcgtccagagagtttcagtactttcttgaagggtttaaaaaatacgcccgtgagtatggcttggtggatgaggaagacccggtcttggcgttcttcgctatccactgcgaagtcgaacccatgcacgtagcgaccgggcgggagatcgtaatttcatacttggagaaaaacccaggtatcgctccacaagccatgcgcggtgcgatggcattcatggacggttttgaacatatgttttcggcacttaatcgtcgccttgccgacccgcagagtctttgaattctggagattgtctacatgtataagtcttatgagtgtcagatctgtcactacgtttattccgaggcattgggtgagcttctagtcgacgttgaggcaggaacaaggtggggcgagctagacgacaattttcagtgtccgcactgtcgggcaaagaaaaaaatgttcagagagattgtgaggtaaatgcacgactttctgagtgcaatgctattttcgacactgctttcaataagcgttggaccgatagccttgatcattctaaggcagtccatcgtctttggctttcgcagtgcattgcccgcagccctgggggcggcagttgccgacgcggtatttgcagctgtcgcctttacaggcttgaaggtggtcgaagcattttgggtcgccaatcatcagctattgacgtggggagcgattgcctacctcctttatcttggtgttaccacattcaagaacgctgctggcacgatgcagataacgtgcaccgcaggatttgtaccggtctttttactgacgttgactagcccgttcaccattgcggcgatttcttcctatgccatcgccagcggcgcccagcttcaggggcagggaatctactggaatttgctgggtgttctagtgggctcgtttctcgggcaaatgttgtatgcagcagggggtggggggatgaagaagctgtttgctgaacgttcaggttttggtgtgctcaatcgagcgagcggggtgtgtctgattggatttgcgggctggcagatggcttgtgctctatcgctataggcttgcccccgatggcggtggatgagtcagctagaggtaagctgactcatccaccgccatcggggcgagccacctcccacattaatcctgcgttcctagcgccgacctgtgcgggtactcacatccacccaaaccgccaacaccagaatgctgcccttcacgatcatctgccagtaactgtccacatccagcatcgacatgccgttatccaggctggtaatcaccagcgccccgagcaacgcgccatacaccgtgcccgagccgccgcgcatcgatgtgccgccaataaagcacgcggcgatggcatccaactcgcccatgctccccgccgacggcgagccggcagccaggcgcgcagtgttgaccaacccagcgagcgcacacatcacgcccatgatgccgaagatccacagcttcaccgcctgcacgttgatgcccgacaggcgcgtggcttccatattgctgcccaccgcatacacgcggcggccgaacacggtctggctggtgacgtagctgaatacaccgagcagtaccagcaacagcagcaccggcacggggatgccgtcgtagctgttgagggtggtgacgaacccggccagcaccgcgccgatcaccaccacgcgcaacacatcacgcacccatgaatgcgccgccaggccatgcagtgcgcggttgcgccgttgtttccaggtgaggaacagggtcagggcaaacagtaagacaccgaggccgatcccgaccgaatggggcaaatacccttggcccacatacaccaaggaaggcgacaccggcgcaatggtggtaccgcccgtgatccccaggagaatcccgcgaaacgccaacatcccgcccaggccaacgataaacgacgggatacgcaggtaggccgtcatgtagccgttggccaacccgatcatcaagccgcacagggcaaccaggctcaggttcgccaacagcggcacgtgatacaccacgtccaagatcgccgccaacccgcccagcaagccgagcaacgagcccaccgacaaatcgatctcgccactgatgatcaccagcaccatgccgcacgccaggatcccggtgatcgacatctgccgcagcaggttggacaggttgcgcggcgtgaggaagccaccctcggtctgccagctgaaaaacagccagatcaccgcgacggcgatcaccagggcaagcattttgtagcgggtaaacagctgtttgagctgattcatctacgcggtcttccgatcattattattgtgttggctgagcgccgcggcgagcacctgttcctgggtgagtccctcgttgatgaagtcgccgcgcaactggccgtcgccgatcaccagcacgcggttggacacgccgagcacttcggccagttccgaggagaccatgatgatcgacaccccctcggccgccagcgcgcccatcagtttatagatctcatacttggcgcccacgtccaccccgcgtgtgggctcatcgaggatcagcacgcggggcttggccatgagcattttcgccagtacggccttttgctggttgccaccggacaggctggtgatcggcaggaacgggctggcggtcttgaggtgcaggcgcgcgatctgctggtcgatgctgcccagttcggcttcggcgtcgatgcgcgtcaggtgggcgtaggtgtcgagcaccgccaaggtgatgttctggcccacgccgaagtcgggaatgatgccctggcgcttgcggtcctcgggcaccatgcacagcccggcgcggatcgatttgagcggcgtgcgcgtgtcgatcacctggccgtccagccacacctcggcgctgtagcggccggggtaggcgccgaacagcgccgacaccagttccgtgcgcccggcgccgaccaacccggcaatgccgaggatttccccgcgcttgagcacaaaggacacatcgtccacgcgcttgcgcctggggttgtcgacgtcgtagcaggtgacgttgcgcgcttcgaaaatcacctcgcctaccgcatggggctcggtggggtagaggttgctcatctcgcggccgaccatttgggtgatgatctgcgcaatgtccatgtcggccatggcggtggtcgcgatgtgcttgccgtcgcggattaccgcaacggtgtcgcataccgccgccacttcgtcgagcttgtgcgagatgtacacgcaggccacgcccttggccttgagaccgcggatgatatccagcagcacctcgatttccgagcgggtcagggccgaggagggctcgtcgagaatcagcagccgcgcctgtttgttcagggccttggcgatttccaccagctgctggtaaccgccgccgtactgcgacaccggcagcgccacgttcatgtccggcaccttgagctcgcgcatcaaagcctcggcacggtggaacatcgccgggtagttcatgcgcccacccggcagggtcagttcatggcccatgaagatgttttcggccaccgacaggtcgggcaccagggtcagttcctggtggatgatcacgatgccggcggcctcggtttcgctgatcgactgggccttgagtggctgcccgtcccagagaatttcaccgtcccaggtgccgtggggatagaccgccgatagcaccttcatcaaggtggatttaccggccccgttctcgccgcacaggccgacgcattcccccggccgcaccttgatatcgatgccgtccagcgcgttgacctcgccaaagcgtttgacgatgccgttcatttgcagcaggtagtcggacatggcggtcactgcccggccatctgctctttggtgtagaacccgtctttctccaacaggtcgatattggccttggtcagcggggtcggggtgagcaggatggtgtcgaccttcttgctgccattgtcgtactgcgagctgtaggtgggtttttcgttacgtgccagttgcaccgagagtttggccgcttcggtggcgatcagcttgagcggcttgtacacggtcatggtctgggtgccgtcgatcacgcgcttgaccgccgcgaggtcggcgtcctggccggagatcggcaccttacccgccagtttctgcgcggccagggcctggatcgcgccgccggcggtggcgtcgttggaggcgacgatggcgtcgatcttgttgttattgcgggtcagggcattctccacgatgctcagggcctcggtggggttccattccttcacccattgctgcccgaccaccttgatatcgcccttgtcgatggccggttgaagcaccttcatctggccttcgcgcagcaccttggcgttgttgtcggtgggcgcgccgccgagcagaaagtaattgcccttgggcgccgcttgcagcacgccgctggcctgcatttcgccgactttttcgttatcgaaggagatgtaggcgtcgatgtccgcgttgaggatcaggcggtcataggacaccaccttgatcccggctttcttggcttcggcgacggcgttggtgagcacggtggcgttgaacggcacgatgacgatcacatcgacgccacgggagatcaggttttcgatctgcgagatctgtttttgctcgttggcatcggccgattgcacgaagaccttggcgtcgagtttctctgcggcggcgacgaagtagtcgcggtcgcgggaccagcgttccaggcgcaggtcatcgatggaaaaaccgatcttcgggtgggctgagtcggccatgaccggcagggcgagcagggccagggcagtggcgatgagggtgcgtttcatggttgtgcgtccttttattgttgttggaaagacagtggcgaaacgggttttttgttgtgagcggttctgttgtggcgagcgggcttgctgtggtgagcgggcttgccccgcgttggggcgcgaagcggccccttcccggcgacatgttttacctgacacaccgcggcgcctggttctggggctgcttcgcagcccaacgcggggcaagcccgctcgccacaacaagcctggtcaccacaacaagcccgctcgccacacgttcagcggtagataaagcgattcacaataccttccagcatctcctgccggccactcaccgcctgcgggttcaactcctgcgcaaaggcatgctcggccagcgactccaggctgaattcacccgccagcaccgcttggcccagcggctgctgccagccggcgtaacgctggtccttgaactgctgcaaccggtcgttttcaaccatggctgctgctcgctccagcgccagggccaacacatccatcgccgccacatgtccgtggaacaggtccacctcatcaaggctctggcggcgtaccttggaatcgaaattgtagccgccattcttgaaacccccggccttgaggatttcataggtggccagggtcatttcctcgacgctgttggggaactggtcggtgtcccagccgttctgcgggtcgccacggttggcgtcgatgctgccgaaaatccccagggacacagcagtggcgatctcatgatgaaaactgtgcccggccagggtcgcgtggttggcctcgatgttcaccttgatctcatgctccagcccgaactcatgcaggaagccgaacaccgtggcgctgtcgtaatcgtattggtgcttggtcggctcctggggcttgggctcgatcagcaggtcgccggtgaagccgatcttgtgtttgtgctccaccaccatgcgcataaagcgcccgagctgttcgcgctcgcgcttgaggtcggtgttgagcagggtttcatagccttcacgaccgccccacagcacatagttggcgcccttgagccgcagcgtcgcgttcatcgcactgaacacctgggcggcggcgtaggcaaacacctccgggtccgggttgctcgcggcgccggcggcaaagcgcgggttgctgaagcagttggcggtgccccacagcagtttgatgccggtctgttcctgatggcgttccaggtggtcgaccatctgcgcaaagtgattgcggtattccttgagcgacctgccttcgggggcgacgtcggtgtcgtgaaagctgtagtagtcgatgcccagcttggagaaaaactcgaaggccgcgtccgccttgccgatggccagttccatcgggtcgccactgcgctgccatggccgcttgaacgtgcccacgccaaacatatccgcccctggccagacgaaggtgtgccaatagcaggccgccatgcgcaggtgctcgcgcatcggtttgccgaggatgattttattggcgtcgtaatggcgaaaggcgaggggagagtcgctgctggggccttcgaagcgaaccttctcgacaccggggaagtacggcatggcgttttccttattgttcttggcggtgtctggatactagcaacggcacctggcctgctgattatgaaaatcaccaacggacagtgcgattttgcgcggcaggggctaggctgttgcgaccggccccaggacaacaacaatgaaaaccctaccgcccgtgcaccgcatcgccttgctgttcaacggcagcaaaatctacgaccgtggcatcatcgccggcatcggcaattacctgagcagcacccgcgcttcctgggacttgttcctcgaggaggacttcctgtgccgcctcaaaggtatcgagcgctggcagggcgacggcatcattgccgacttcgatgacccactgatcggcgaggcgctggccggtagcaaggtgccggtggtggcggtgggcggatcctatgaagatgcacgcgcctaccccaagggcatcccctatgtggccaccgacaacgcggccttgatgaaactggcctacgagcatctgattgaggctggagtgacgcggtttgcctgtttcagcctgcccgaagcccaggccaatcgctgggcccaggagcgcgaaaaggccttcaagcggctgctgcaacgcgatggcttgccagtgcagatctatcgcggcctgggcaccagcgcgccgctgtgggacagcgcggtggagcagcagatcgcctggctgcaaagcctgcccaagcccatcgggattattgcggtcaccgacgcgcgcgcccggcaactgctgcaagcctgtctcaccgccggcatcgcggtgccggaagaggtggcgctgatcggtatcgacaacgacccactgacccgcaccctcacgcgcgtgccgttgagttcggtgatccagggcaccgaaaccatgggccgcaccgccgccgcgctgctgcaccagatgctgcacggcaagccttgcacgggcacgcaggtgctggtgccgccggatgcgatcaacgtgcaggcctcgagcctgcaccaacccttgggcaacccttacgtgatgcaggcgctgctgtttatccgccaatacgcctgccagggcatcaagaccgcccaggtggcggcttatgtcggggtgtcgcgttcatcgctggagtcgcactttcgcaaggcgcgcgggtgcagcgtgcacgatgagatcctgcgcttcaaactcgccagcgccgccaagggcttgcagggcaaccacctggcgattgccgacatcgcccagcagtgcggcttcaagtcggcgcagtacctgcacaccgtgttccggcgcgagttcggctgcacgccacgggaataccagcacagccattagaaactttgcaggcatcgcccattcgccgctggacttgcaccgtacagactagggagaatggttttttgtggcgtaaatggaagctcccatgaccgacagtgcccagcgtgccgccagcgacatcgacctgatgaccgaagtggccatgctttattacctcgacaacatcacccaggaagccattgccaagcgcttcgacctgtcgcgggtcaaggtcagtcgcttgctcaagcgcgcccgtgatgaaggggtggtggaggtgcgggtgttgcagcatccggccctgaacacggagttggagcaggcgctggtcgagcgtttccagttggaccgcgccttgatcgcggtcgaccacggcgaccccgacacccagcgctcggccgtggccagcctggtcgccaattacctgaacaagaccctcaccgacggcatgatcgtcgccgtcggcatgggccgcaacgtgggcgccgtggccgagaacgtgttcttgccggtgacgcgcaactgcacctttgtgtgcgccatcggcggctcgctcaaggccggcgaatacatgaaccccgaccatatctgccggcgcctggccctgcgttttggcgccgagagcgaaaccctgtatgccccggccctggtggccaacccggaactgcgcagcgtgctgatcaacaacgacaccgtgcgctccaccctcgaccgtgcgcgccgcgccgatatcgccttgatcggcatcggcgacatgagcgagaacagcaacatggtgcgcatgggctggttctcaccccaggaaatcgcccaggcccgggtgtcgggtacagtcggtgacatgatgggctacgactttatcgacatccatggccaaccggcggtcaacgccatgcagggccgggtgatcggcctgtcggtacaggaactggtgcgcattcccgacgtggtggcgattgccagcgaaaacaccaaggcggcggccaccctcggtgcgttgcgctccggggtgatcaacaccctggcgacgaccgtgtcgaatgcctacacgatcctcgccctggatgatgcaacgcgtcgctaggtgacatcttgtatgtggtgagcccgcttgttgtggtgaacaggcttgttgtggcgagcgggctttctgtggtgagcgggcttgccccgcgctgggnnnnnnnnnnnnnnnnnnnnnnnnnnnnnnnnnnnnnnnnnnnnnnnnnnnnnnnnnnnnnnnnnnnnnnnnnnnncccagcgcggggcaagcccgctcaccacagaaagcgggctcaccacacaaagcaggctcacaactacgccaccaaccgcgcctcaaccgattcggccaggttggtcaggatcaggcagcacgacaccgcacccgcgtccaacacccccagggagcgttcccccaggcggctggcacggccgatcttggccaccaggtcgcgggtggaatcgcggccctgggacgcggcgctttgcatccggtgcaacgcttcgcggaacgtcgcgccgctggcctgggcctgttcaaacgcttccaccgccgggatcaaggtgtccatcaggcacttgtcacccacgccagcgtcgctgatgtcctgcagtgaggtcaggccgccgcgcagcagcctggcgaaggtcgccccgtcgatgctgtcgcggtcgcgcacttcgtcggccatgccgatgaacaggctgccatacagcgggcccatggagccgccgatgccttccatcaacgccagggtcagttcgtccagcgcttcggccagggacagttcgcggccttccagagtcttgccgcagcgcgagaaccccttggccatgttgatgccgtggtcgccgtcgccgatggcgccgtccacttcactgaggtattcgcggttggcaacgatgatcgacaccaggttggtgacaatggcgccgccggtgttgctcgggaaatgttcgcgcatgcttcactccgactgggtcatgccgatggagcggcaaggttggtcgatcaggcggctcagctcggcgtctaggccgagcagggtcagggtcacgcccatcatttccagggacgtgaagtagttgcccacgtaacaacgatgaatgcgcaggcccttggcgcgcagttggcgctcgacctcggcgtagaaaatataaagctccatcaccggcgtggcgcccaggcccgagaccagcaccaccacgctctggtcctgggtgaagtcgcggtcggccaggatcggcgcaagcatgcgctcggccatggcggcggcggactccaccggcaccacttcgatacccggttcgccatggtggccgatgcccagttccatcaggccgtcggcaatctggaagttgggtttgcctaccgccggaatggtgcagggcgtgagccccacgccgatggagcggcaatggtccacggccttctgcgccacgcggatcacgccgtcaaggtcgtagccctgggcggcggcggcaccgccgatcttccacatgaagatctcgccggccacgccacgccgcttggcgatttcggcgagcggggcggaggccacgtcgtcgttggcgaccacggtgcggatgttcatggctttgctggcggccattttcatcgccagcttcacgttcatgttgtcgccggcatagttgccatacaggcatgccacgcccgcgccctggtcggcggcacggaacgcgtcgaagaagctcttggcggtgggcgaagagaagatctcgcccaccgccaccgcatccaccagccccgggccgacatagccgagaaacgccggctcatgccccgaaccgccgccggtgacgatgcccacctggccggccggtgagagggtgcgcttgccgatgacccgtggattgctctcgtactgcaccagttccgggtgcgcgaggaggatgcccgcgagcatgtcctcgaccaccaggtccggatcattgatgactcgattcatagggtgtttccttgttcttattcgtctggaatcggtttactgaatgctgtagccgccgtcgatcaccacgttttcgccggtgatcatcttggccgcgtcgctgaccaggtagagcaccaggccggcgatttcttccggctgggcgaagcgccccaccgggatctgcaatttggcccgttcgcccagttcgcccgcccaggctttcttgcccagcgcggtttcgacgatggttggcgacacggcgttgacgttgatgccgtggggcgcccattccatagccagtaccttggtcatgccgaccacggcagccttgctcgcgcagtaggccacatgccggtccaggccgatgacggcggcctgggaggcgaggttgacgatacgcccgccgccttgctcgatcatatgctgcgcacaggcctgcgccatgaagaagctggccttgagattgatatccagggtggtgtcccaggcgttttcatctacgtccagggccttgtcgagcagggcgacccccgcgctgttgaccaggtaatcgatgcgcccgagcccggcagcggcctgatccacggcggcctgcagcgaatcgagctggcgcaggtcggccaccagccccacatgacccgcgccgaggctggcagccacttcgaccaccgccgggtcacggtccagcaacgccacccgggcgccgcgctccaccagcaactgggcacaggccaggccgataccggcggcgcccccggtgatcacggcgcaacggccggtgaggtcgaacgcctggttccagaaattggacattgcacacactccacttagcgttttttcttgcgccagacatcaatcaacaccgcaagcacgatgatcaatcccttggccacttgttggtaatacgacgacaccccgagcaggttcaaaccgttgttgatcacaccgatcagcagcgcgccaaacaacgtgccgacaatgctgccggtgccacccgacaggctggtgccgccgatcaccaccgccgcaatcgcatccagctcataagacacgcccgcctggggcagggccgaggtggtgcgcgccgccagcaccacaccggccaaccccgccagcaggccggaaatcacatacaccgagaacgtgaccttgcgcacgccgatgccggaggtgcgcgcgcttttttcgttgccgcccacggcgtacacgtagcgcccgtaggtggtgtagcgcagcaccatccagaagatcagcgcgaccaccgcaaagataatgatcggcacgccaatggggccgagcttgccgatgcccagggcgaggaagctgtccggcaggtcggtgaccgggctgccgtcgttgagaataaaggtcatgccccgcgccacgctgagcatgccgagggtggcgacaaagggcgggatgctcaggttggccaccatgaaaccgttgaccacgccaagcatggccccggcaaacatccccgcactcaccgccgccagcaggccatagccctgggtggcgaccaacgcgctgcacaaaccggcaaaggccaggatcgagcccaccgacaggtcaatgcccttggtgaggatcacgtaggtcatgcccacggccagaatgccgttgatggaggtctggcgcaggatgtccatccagttgcgccaggtcatgaagtattcgctggaaaacgccagcaccagacacagcaggataaacaccagcggcaggccgaagcggtcgagggacaagcgcaggcgattgcgcggcggggcagtgacgggtgcggcgaggactttactgttcatgaggcaagactcaacaaggcttcctgggaaagggcggtatcgctgctgacggtcaccaggcggccgcccttgaacaccgcgatgcgatcactcaggtgcagcaattccggcgcctcggacgagaccacaatggccgcaccgccggcgcgcacgaattcgtcgagcaggtgatagatctcctgcttggcgccttcgtcgatgccgcgcgtcggctcatcgcacagcaggcagatcggctgggtcgacaggcatttggcgagcaccactttctgctggttgccgccgctcatggactccaccggcaggtccagggacgaaatcttgatctgcagacgcttgaccatgctctgcgccagggcctgttccttgcgcgcattgatcaccgaccagctcgacaattgcttgtaggccgacagcgcgatgttggcgaggatgctggcgctgagcaccaggccactgtccttgcggtcttcggtgaccagggacatgccggcgcggatggtcgccgctggcgtgccgatgggcaacggctggccttgcagggtggcactgccggcgtccggcagggtcaggccatacaggcagttgaggaattcgctgcggcccgagcccatcagcccatagatgccgaggatttcgccctggcgcagttgcaggctgatgtcctggaactcgccgtcgcggctcaggccactgacatccaggcacgtggtggcagcgcattcgcggccgactttatggtcgatgcgctgcagctcctggccgacgatgccgcgcaccaggtgggcgcggtcgatatcggccatgcgcccgctttccacaaaggcgccgtcgcggaagatgctgtagtcatcggcaatctgcgccagttcactcaggcggtgcgacacatagatgattccggcgccacgcgcggtcaggcggcggatcgccttgaacagggtttgcgcttcatgttcgccgatggccgaggtgggctcgtccatgatcatcacctggcagtcatggctgaacgccttggcgatctccaccagctggatctgcgccacgctcaggcgatgcatggggctggtggcatccacgtcgaactccaggctttgcagcagttggcgggtgcgtcggttcagttccttgctgtcgacgatacaaccggcgcggcgcggttcgcggcccagccatatattttcggcgacggtcatgtaggggatgggttccagctcctgggtgatcatcgccaccccggcggcgagcgccgcgctggggcggtcgaactgcaccggctggccgttgagcaggatgctgccggcgtcacgctgggtgatgcccatcaagatgctgaggaaggtggatttgccggcgccattgccgccgcacagtgcgtgcacgctgccggcccgcagggccaggcgcccgtcgcgcagggcagggaccccggcgtaggccttggaaacttgttcagcctggagcagtaatggcggggccatcggtgtgtcctcttgctgattttcttattaggtaggcttaggcaacagcctgatcatatgatcggatagtgatcatatgtttaaactggtcgagttggttttgtcaatggcttggcgcagcattcgcctgaggttttagggttttcgcgggttgctgccttgaaataagccttgacagcagcagggctgtcgtccgctaatgattgtgcataatttcagtgagtgatcatttgatcggtctgatggagaaacagtaatgggtgcacaaacgacgttttcggtggccatcggatgcgacgaggcgggctttgagctcaaggaaatgctcaagcgctttatcgaaggcctggggtatggggtcgaggactttggctgccattcgtccagcccggtgctgtatccggacatcgcagcggcggtggccacggcggtgggggcgggtgagcagcgcctgggtgtgctgatctgtggcaccggcatcggcatggcgatttccgccaacaagatcaagggtgtgcgggcggcccaggcccacgacacctattcggccgagcgcgcccgcaagagcaacgatgcgcagatcctgtccatcggtgcacgggtgatcggccccgagctggccaagagcatcgtcaaagtgttcctggagtcggagttcgaagcggagcgctccgggaagaaagtcgagcgcatcactgcgctcgaacaggcgaacagggcgttgccgtcagacgactgagccgcttcagaacagcgccttgacctgcaggcccagcaccagggcgttgtcgatgttgtcaccggaaaacgcccccggctcgatgatgtattgcacatccgggcgcagggtcagccagggggtggcctggtagccgtagctgagttcgatcagttgttcggcgttgttcaggttggggtagtcggtcccggccttgaaggcggcctgttcctgtacctcgcggctgcgcgggttcggcacggcacggccatagcccagcgctacggtgtcccgcggccggccctcgaacggtttgtacagcaccacacctgcgccataccacttgctgaacggcgacgccgcttcgctggcggcagaatactggccgaaggcgtgtaaaacacgaccgctggaggaatccgaagcccaaaccgcctggtcgatcagcaggtagtgaccgccgcgaccgctgacttccttgttgctgccgatgcgtttcacgtcggagctgtcgtagtaataacccagcttgtattcacccggcaggctgccggtgtgtttgtagatcaattcgatcggcaccacggtgccggtggtgtgcttggggtccaggcgccaggcgcggctggagttgccgttgctttgcgggtcgacgttgaacgcggccacgcgcagttgccaggccggcgagaagtcatatttaacccgcgcacccaggcgtgcattcgggtagttggtccaaccgctgccgccggacatattcagcgggtgcccgcagaacccggcgttcatgaagttgcacagaatcccgctgtcgaggccgccgaggtcattgcccatggccatgtagccgagcttgacgttcagcgccggggtgaacagcgtgcgttcgtagctcaactcggtgaggcgagtgtagaggccgccgtagttttcctggatcggcaggcggttgcccaccaggtcctcggaggcactgttgccgcgccggtcattgatcgtgagctggatgcgatcgccattggtgaggccgtagagcttgcccaggtcgaactgcacgccgagcttgaggttctgcgagtagcgcgccgaacggtgctggccgccatgggcgttgtaggcggtttcgccactgtagtcgccgctgaagcggatgccctgtgcgtcgagttcacggcgcaggccgccccagtcgccggtcagggtggtgtcatcggcttgcacgggcagggcggcacccagggccaggcccagcagcaggcgcccaaggggaatatgagaagtgggggtcatgcgggtttttccaggcacaaggcgcggcgccggggaggcgccgcgcgaacggggggttatggcagggcgtaggcgatcacgtagtcgccacggtcggtggactggcgtgcgccaccggcggtgatgacgatgtactgcttgccggttttcggcgacacgtaggtcatcgggccgccttggctgccgacgggcaggcgggctttccagacttcatcaccgttgccgctgttgaaggcgcgcaggtagaagtcctgggtgccggcgataaagatcaggccgccctgggtcgacagggtgccgccaagggtcggcaggccgatcttgatcggcaggtgcatgcggatgcccagggggccggtgtcttccacggtgccgaccggcacttgccaggcgaccttttgcgtcttcatgtcgatcgcggtcaaggtgccgaacggcggcgcctggcacggaatgccggccaccgacaggaagcggtttttgttcaccgcatacggcgtgcccttgagcggcacagcgcccatgccggtgttcagcgcttcgccaccggacgcggcctgggccttgttctgcgacggaatcatctggatccacaggcccaggcgcatgtcgttgacgaagataaaaccgtgcaccgggtcggtggaaatgctgccccagttcatgccgcccagggagcccgggaagctcagggatttatcggtgcccggcgcggtgtacaggccgtcgtagcgcatgcccttgaagtcgatgcggcacagcaactggtcaaacggcgtggcgccccacatgtccgattcggtcagggtctgtgcgccgatctgcggcatgccgaccgattttggctgggtcgccgagtagggttcgttggggatgttggcggccttgaccgggacttccttcacctcggtcagcggcttgccggtggcacggtcgagcacgtagatctgcccggccttggtgccgatcaccaccgcaggcacagccttgtcgctgccgggcggggtgaagtcgatcaggctcggctgcatcggcaggtcgaagtcccacaggtcattgtggacggtctggtacacccatttttccgcgccggtggaggcgtccagcgccagtaccgacgcgccgtatttgtgattgagctgggtgcgctcgacaccgtagatgtcggtggacgaactgcccatcggcaggaagaccgtgttcatcagcgggtcataggacatcggcgcccagctgttcggcgtgctgcgcacgtaggtgctgccgtcggccggggcttttttgtcttgcgggttgccggggtcgaacgcccagcgcatctggccggtgatcacgtcgaagccacggatcacgccgccgggcatgtcggtctgcacgttgtcggccacacgaccgccgaccaccacggtggtgccggcgatcagcggcgccgaggacagttggtagtagctgtccggcacgttacccaggccggctttcaaatccacctggccgtgggtgccgaagtcttcgcagaactggccggtgtcggcgtccacggcgatcaggcgtgcatcgatggtgttggtcagcaagcgacgctggcactgcgcaccggcgggcacgctggcggcgatgatcggcgagctgttcggttgggtcggctgggcaatcggagcggtggcgtcgaagtaggccatgccacggcaacgctgccacaccgccgatttggcgttgacctcgttcttccacagctctttgccggtgtcggcgtcgagggcgatcaggttgttgtgtggcgtgcagatgaacactttgttgccgatctgcagcggggtgagctggtcttcggcaccgttgccgtcgctgatggcgacgtcgccggtgtggtaggtccaggccactttaagcttgttgatgttgtcacgattgatctggtccagcgcagcgaagcggctgccaccttcggtgttgccgtagtgcgcccagtctttctgctcatcggcagcggccaccggcgtgatgccagggccgttaccggtgggagcaacgcttgggtgggcaacaaacatattgcccgccgccacggccacgcccaccgccaataccgccgccacgccataggcgccgcgagcaggccggttgaccagcagcgggtacaccagcgctaccaccgtgccgatcaccgcgaacatgaacacgcgggagaacagcggccagaacaccaggcccacatccgccaccgcccagagagccgtgccgaccaggaaggccgcgaacagccacgcgcccgccggcttgcgtcgggcaatcagcaggcccgacacggccatggccgcaccgccgatcaggaagtaccaggaacctcccaggctcaccagtttgccgccgccaatggccagcgcgaggccgagcagggcgatgatcacgcccaggcccagcagtaagattctagaggcgccagcggcgcgcgatgctcgtttcatgtcgacagcactcgaatgtgagagggcaaagacgcgattttagcaagataagtaaccagttagtacattgtgcgtggtaatagactcttacggggatggtgatgatcgcgcacaacaaaaagccgcttgcccggtgtcagcggcaagcggctcttgtcagcgatcaccgaaacgccggcacgacctgctcgataaacaacgccagcgacttcttcttctcggcatgggacaggctgttgtcgcaccagaagctgaactcatccacgcccagttcctggtagtactggatgcgcgggatgatttctgcggcggtgccgatcattgcggtcttgtgcaggctctccagctcgaactcggggcgaccggcgaacttctcttccgggctgggctccaggaagccgttgaccggcacgctcttgttgccgaaccaggcatcgaaggtgcgatagaaccgggagatggccttggccccgactttccagccgtccggatcgtcctcggcgtgcacgtgggtgtggcgcagcaccatcagttgcgggcgcggtacgccagggttgttgtccagggcagcctggaatttgttcttcaggtcgaggacttcttcgtcgcccttcatcagcggcgtgaccatcacgttgcaaccgttggccacggcgaagttgtgggagtccgggtcgcgggcggcgatccacatcggcgggttgggctgctggatcggcttgggcacgctggtggaggtggggaatttccagatgtcgccgtcatgggcgtagtcgccttgccacaacgcacgtaccaccgggaccatttcgcgcagggcctggccgccgctgctggcaggcatgccgccggccatgcggtcgaattccacctggtaggcgccacgggccaggccgacttccatgcgcccgttgctgatcacgtccagcagcgcacattcaccggccacccgcagcgggtgccagaacggcgcgatgatggtgccggcgccgaggtggatggtggtggtcttggctgcgaggtaagccagcagcggcatcgggcttggcgagatggtgtattccatggcgtggtgttcgccaatccacacggtgctgaagccaccggcctcggccatcagggtcaactcggtcaggtcttcgaacaactggcggtggctgacgctttcgtcccaacgttccatgtgtacgaacagggaaaacttcatgacgcttacctcggatctattgtgatcggcctgtcgactgcaggcccttaagtgctctcgccaatctgaagcatgccggtgatgacggctgttcggcggattgattgttggtataccataatacggaatatccgcaaaacatttctctccaacggtcacaccctcacctcacaaggaaggcgagcctgatgaacataaaacaaaaattgatcctggcctttgcggtgatcgccagtctgccggtgattctggtggctgtgctgatcatcctcaacgtgcgccatgcggcgcgggacggctttgtcgacagcagcgggcgcgagatccgccaggtcgacaatgccatgcagctgtttttcgaaggcatcagccagaacgtcggctacctggcggcgcacccgcaattgcagggcatccagggcgacctcaagcgttacctggccagcgacgccgcgcaagtcacccccggcgagcgtgaccagcaactgttcacgctgttcgaagggctggccaagagtcattcggcctacacctatttatcgctgggcaccgaagacggcggttatgtgttctggcccggtgaccccaagcttgccagctacgacccgcgcactcgcccgtggtacaaggcagccatggcagagccgggcaagacccggcgtaccgaggcctattactgggcggccgacgacgtggtgctggtcagtacggtgcaaagcttcaacgaccgccagggcaaggtcagcggggtggtgaacatcgacgtgtcgctcaagcagctcaccgatctggtcaagcagatcaagctgggggagagcggttacctgatgttgatggaggccaacaacacggtgttggtggacccgaatgacccgtcccacaacttcaagaaactcggcgagttgggcgagggttatcgccagttgagcgagaccggcgaaggcctggtgcaggtcgagttggcgggggagcgctacatggcgctggtgtggccgtccaaggcgttgggctggcgctttgtcggtgtagtgcgggaaagcgaggtgatggccggtgcggcgcgcctgacctggctgatcgccgccattgccgtggtgtgtggcgtgctgtttgccatggcgggcgcgtggtttgcagggttgatcgtcaagccgattcgcggtgtggccagcggcctggaaggtatcgcccagggcgaaggtgacctgaccgcacgcctgacggtgagcggccgcgatgaaacggcgcaactggccggctggttcaaccagttcctggaagcgatccgtacgctgatccagcgcattggccaggccgccgggcagatccatacccgctccggcagtgccactgaggtctcggtggaaatggccgatgtcgccgagcgccagcgtgaagccgtggacatggtgtccacggccttccatgaaatggtcgccacttccaacgaagtcgcgcgctcctgcagccaggccgccgactcggccgacaacggccagcgccaggcccacaccgggcagcagcagatcgatgcggcggtgagcagtgtcgggcgcttgagcgaagagatcggccactctgcccaggccatggagcagttggaaaaagacagcaacgatatccagtcgatcctcggcaccatccgatccatcgccgagcagaccaacctgctggccctcaacgccgccattgaggccgcccgcgccggagagcagggccgtggctttgcggtggtggcggacgaagtacgtgccctggccaagcgcacggcggattccaccggcgagatcgacggactgctgggcaacctggcgcggcgcacgcaccagatgggcaagcagatgcacgcgagcctggaggtgtcccaggaaaccgtggtgtcgatcaatgaggcgcgggccagctttgggttgatccgtgaatcggtggatgtgatccgcgacatgaacacccagatcgccaccgccgctgaagagcagcaccaagtggccgaggatatcaatcggcacatcagccagattcacggggatgcgcagttggtggcgagcctggccgactccacgcgccaggatgcacagcagttgacggcgttgtcgcagacgttgaaccagttggtcagccgcttccgcacctgatttttgtaggagctagcaagctcgctcctacagagagtgcagtcaggccggcatgggcagggcgcccatcttgccgtggcaatacaccagtggcccggcgttctgccggggcacgatcaggttcttcacagcgcccaccatgatcgcgtggtcgccgccttcatattcacgccacaactcgcactcgatcaccgccgtggcattcgctaggatcgggttgcccagttcactcaaggtccattcgatgccctgggccttgtccttgcccttgcgcgcaaaggcgtaggcttcggtctgctgcccaccggagagcacgtggatggcaaagcgcttgttcttgatcagcaccgggtacgagtcggagctgtagttggggcaaaacagcaccagggccgggtccatcgacagcgagctgaaggcactggcggtcagcccgacgatctggccctcgtcatccagcgtggtgatcacggtgaccccggacggaaacgaacccatcacttgtttgtagatggcggcatcgatcatgggaaggtcctcagacagtgtggcggtttttatggatttgtaggtctgatggtataccgtaatacgacgcgtgcaagatctttttcagccacccgatgaacgcatgcctttggtcatatcaccaataaatacggggttttcagcgagaaacagccataagccatgtggcacaattgcagatcagatgcgtgccaggactacggatcagtcttgtgaaaatgctggaataccataatatggtgttcatctgaggggcgccatgaagcgcccccggtttggcgtcaaacaactataagatcagaccaacgcgagttcatttccatgccccagatgtcccggcaagaccccctgatcgagcatcacacggtcgattacgtccctcccgcagagcgccacggaaaggcccgcgacctgttcaccctatggttcagcaccaacattgcaccgctgcccattgtcaccggcgccatggttgcccaggtgttccatctcaacctggtgtgggggctgctggcgattgccctcgggcatctgctcggcggcatcgtgattgccctcgcatccgcccagggcccgcgcatgggtatcccgcagatggtgcagagccggggccagttcggccgctatggcgcgctgttgatcgtgttctttgccgcgctgatctacatcggcttcttcatttccaacatcgtgctggccggcaagtccatcgtcggcatcgtgccgtcggtgccggttccggcgagcatcctgatcggtgcgctcagcgccaccgccatcggcgtgatcggctaccgctttatccatagcctcaaccgcatcggcacctgggtgatgggcagcgcgctgctggccggtttcatctacatcttcgcccatgacctgccggcggacttcctcacccgtggcggcttcaatgccgctggctggttggccacggtgtcgctcggtgttatctggcagatcagtttttcgccctacaccagcgactactcacgctacctgccggcggatatcggcattacccggccgttcatcgcgacctacctgggcgcgaccctcggcaccatgttgtccttcgccttcggcctggtggcggcactggccacgcccgaaggcaccgaagccatggtcgcggtcaagcaggccacaggctggctcggcccgatcctgatggtgctgttcctgctcaacatcatcagccacaacgccttgaatctgtatggcgcggtgctatcgatcatcacctcgatccagaccttcgccagccagtggacgccgagcatcaaggtgcgcgtggtgctgtccggcgtgattctcgcgggctgctgcgtggtggcgctgggtgcgtcggcggacttcatctcgcagttcatcggcctaatcctcgcgctgctgctggtgctggtgccgtgggcgtcgatcaacctgatcgacttctacgtgatcaagcgcggggtgtacgacattgcctcgatcttccaggcggacggcggtgtttacgggcgcttcaatctgcacgcaatcgtggcgtatttcatcggcatcctcgtgcaactgccgtttgccaatacgtcgctgtacgtggggccgtgggccaacctggtggacggcgcagacctgtcgtggctggtggggttggtagtgacgtgtccgttgtattactgcttggcgacgcgccagcagacgcagcgggtcaagttggtgaacgtgggttacaccgactaatcctcgtgacggcaaaagtgcccggccatgtgccgggtatttttttgcctgcaatgttcgggtgttgcgcaggcgaaaaaaggccgccacaacccgacgttgtggcggcccaaggggtgactcagtgcgcgccggcggccttgttcagatcgctttcagcccattcggtatacacacacgcatccgccgtggcccagcgcacccgcaccgggtcgccggccttgagtggcatgccggcggcggacagtgccttgaccgtcatcgaggtgccgccgagggtttttacgctgcaggtctggctttcgccgaggaacaatacctcgccgacgatggcggacacttcgttccaaccggctgccaagggttcaaggtcagcctgcgccacgctcagcgccagggccttttccgggcgcaccatcagcagcacatcctgttcgctgcgtagcccgctggtcaggcggatcgacagcgattgtccttcgaacgacgccgccccattgccttgggccttgagcttgaggaagttggagttgcccaggaaagacgcgacaaacgcattcggcgggttctggtacaggtcgaaaccgctgcccaggccgacgatcttgccgtggctgaaaatcgcaatgcgctgggacaaacgcatggcttcttcctgatcgtgggtcacgtagacgatggtgatgcccaggcgccggtgcagctggcgcagttcgtcttgcaggtcctcacgcagctttttgtcgagggcgccgaggggttcgtccatcagcaggatgcgcggttcgtacaccagcgctcgggcgatggccacgcgttgctgctggccgccggagagttgcgaagggcggcggtgggcgaacggttccagttgcaccagcttgagcatggcgtcgacgcgcttttcacgctcggcgctggccagtttgcggatcgccagggggaaggcgatgttgtcgcgcaccgataaatgcgggaacagcgagtagcgctggaacaccatgccgatgtcacgcttgtgcggcggcacgttgaccagggattggccgcccaccaggatctcgccgctgctgggggtttcaaacccggcgagcatcgacagggtggtgcttttgcccgagccgctggagccgaggaaggtgaggaattcgccgtcctggatgtccagcgagatgttgtccacggcggcgaattcgccgtagtacttgttcaggttgcgcaggctgaccaggggttggccagggttgcgagtggggtctttgatcacggcactcatgggttaatcctcggcgttcaagcgcgggtttcagtgcgtcgacgggcgacggcggcaatcaccatgaccagcaccgacaggccgatcagcagcgtcgacgcgacggcgatcaccggcgtcaggtcctggcgcagggtggtccacattttcacgggtagggtttgcagggtcgggctggccatcatcacgctgagcaccacttcgtcccaggaaaccaggaaggcaaacagtgcaccggcgaccatgccggggcggatcgccggaaaggtcaccttgaacaccgcttgcaagcgcgacgcgccgcagatcaccgcggcatcttcaatcgactggtcgaacagcttcagtgagttgatgatcgagatgatggtgaacggcaaggcgacgatcacatggctgaccacaaacgcgaacatcgtgccggtgtagccgagcttgagaaacagcgcgtacaccgccacggcgatgatcaccagcggcacgatcatcggcagggtgaacaggccgtagagcaactcgcggccggggaagcgcccgcgcaccagggcaaacgcggtgggcaggcccagggcaacggcgaacacggtggtcagcaccgccaccttgaggctggccatggcggcgttcatccagtcggcattggagaagaactggccgtaccatttcagggtccagcccggtggcgggaacaccagccattgggatgagccgaacgacagcaacacgataaacacgatcggcagcaacaggaacaagccgatcagcccggtggtggtatagaggcccaagcgcatcctgcggctcatggcattgggagtcaggagcatgacggcttacctcgcgttgctggcgccaaccggggattccggctggagcttcaggtagaagtagaacagcaccagcgtgatgaagatcagcagcgccgcgccggcactggccaggccccaattgaggaacgattgcacctgttggatgatgaactcgggcagcatcatgttctgcgcaccgccgagcaacgccggggtaacgtagtaacccagggacatcacgaacaccatcaacccaccggaaaacagccccggccggcacagcggcaggaacacccggaagaagttggtccaggggctcgcgccgcagatcgagccggcctgcaggatcatcgggtcgatggcctgcatggtcgcctgcaacggcagcacgatgaacggaatcatgatgtagctcatgccgatcaccacgccggtgaggttgtgcaccatctccagcggctgatcgatgatgcccatggccatcaacgccttgttgattacgccggaggcctgcaacagcaccagccaggaataggtgcgggcgagcaggctggtccacatcgacagcagtacgatactcaggatccaccggccccagccacgcggcaccagggtaatgacccaggccaacggaaagcccagcagcaggctgaacagcgtcaccaggccggcaacggaaaacgtattgagcaacacccgcgcgtacgccgagttggcgaacagttgctcatagttgcccaggcctggcaccggctccagcaccccgcgcagcaacaggccgatcagcggagcgaggaagaacagacccaggaacagcagggccgggatcaggttgctcgacccccgccagcgttgcgccagggacggtgtcccgacgttgcgggaaagcgcgccggcagcgccgagggcgctcccggtcggtgtggttgccgccattttcatttgactagccattcattccaccgtgtcgcaatggccgggccgttcttggcccagtaggcgaaatcgagggtgatctggtccttggcatacgccgtcggcaggttgggcgcaaggaccgaatccaggcgctgtacgctgtcgatgttcaccggtgcataagcggtcaggttggagaagtcggcctggcccttggcgctgctggcactggccaggaacttcatcgcggcggccttgttcttggtgcctttgggcacgaccaggatgtcggccattaccaggttctgtttccagctcacgcccaccggtgcgccgtcttcctgcaaggcgtggatgcggccgttccagaactggcccatgctgacttcgccggaggccagcaactgttgcgattgcgcgccgccgccccaccagacgatgtcttgcttgatggtgtcgagtttcttgaaggcgcggtccaggtccagcgggtagagcttgtcggcggggacgccgtccgccagcagggccagttcgagcacgccggggcttggccatttgtaaagggcgcgtttgccggggtaggtcttggtgtcgaacagcgcggtccagtcctgaggcttgccggcgccgagcttgccttcgttgtagccgagtacgaaggagaagaagaacgagccgacgccgtggtcggagacaaagcgcgggtcgatcttgtcgcgctggatcaccgagaaatccaggggttcgagcagcccttcggcggcggcgcgcaaggcaaagtcggcctccacatccaccacgtcccactgcacgttgccgctctcgaccatggccttgagtttgccgtagtcagtggggccatcctggaccacggtgataccgctggctttgctgaacgggtcggcccaggcctgcttctgtgcgtcctgggtgctgccaccccaactgacgaagttgacgctttcggccgccatggcggcatgactggcggtggccagcaaacccgcgaacaggactgcgctgatacgtgtgttcaacaccatttttacgccctcattgttgtgtttatgagcggggcttttgagtgcccgcctatcgggagcagtcggtgtggatggcctttgcagggtcatccaacctgtggaatatcatattatggtattccaaactttgcgcaagcattttgccataccggccatctggccaaggtcattcaacgaacggaatactctccaccacttccaggtcgtagccggtcaagcccgcgtatttcagcggtgggccgaggtggcgcagcaggcccacgccgaggtcctggagaatttgtgcaccggtgcccacttccgagtaaatccgcgactgcgagcgattgaattggcgcggtgcctgggtcagttgcggcacgcgctccagcagcgcctgggacgactcatgattggccagcaccaccaccacgccgctgccttcagccgcgacgcgttgcaaggcggcccacaaggtccagttggacgggccgctgtagtcggcgccaaccaggtcgcgcagcgggtcgatcacatgcacgcgcaccagtgccggcgtgtcgcggcgcagctggcccatgaccatcgccatgtgcacgccgccgtcgatgcggtcttcgaaggtaatcaggcggaaggtgccgtgcaccgtgggcaggtcgcgttcgccgatacgcaccacggtgcgttcggtgctgaggcggtagtggatcaggtcggcgatggtgccgatcttgatgccgtgcttgcgcgcaaacacctccaggtccgggcggcgcgccatggtgccgtcatcgttcatcacctcgacgatcaccgaggccggggtgtgcccggccaggcgcgccaggtcgcaaccggcttcggtgtggccggcgcgggtcagcacgccgccgtccttggcgcgcaacgggaaaatatgccccggttgcacgatatcggcagggccggcgtcgagtgccacggcggccgccaccgtgcgcgcacggtcggcggcagagatcccggtggtcacgccggtggccgcttcgatggacacggtaaacgcagtgctgaacacgctgccattgctcggcaccatctgttccaggcccaggcgctggcaatgttcatcggtcagggtcaggcagatcaggccacgggcttcgcgggccatgaaactgatagtctcggcggtgcagcacgccgcaggcaacaataggtcgccttcgttttcccgatcttcgtcgtccaccaggagcaccatcttgccctggcgatagtcttcgatgatgtctgcgatgctgttgaaggacatggaggatgctcggcttgttggttgtatgtattatggtataccacaaaaattcaataagaggatgtgcgatgaaggcctactggattgcccacgtggatgtggcggatgccgagcaatacacgcaatacaccagacgtgcgccggcggcgtttgcgaagtttggcgggcggtttctggccaggggcgggcgcagtgtcgcgctggaaggcggaccggcacggcagcgcaatgtggtgattgagtttgatagctacgagcaggcggtggcgtgttatgagtctgccgaatatcaggaggcgaaggcgcaccgtgaaggggcaggggtggcgcagatcatcatcgttgaagggctggcaccctagatgatcaggccagacgttgggttaaatgtgggagggggcttgcccccgataacagtgtgtcagccactggataaggtgactgaaccaccaccatcgcgggcaagcccccgcccacattggaaccctgtttggtcgagaggtcagcggatgaagtggatcttgccgctgtcgtcattgccgatatagatgccatacaccccggcctgccgctcctcgatataacgttctaggatctgccggatcgccggatagtaaatgctgtcccagggaatctcctcaggcgcaaagaacttataatccagcgtctccggcccgaactgcccggtaatctccagcgcaatcgcgcggaagatgatgtacacctcgctgatcctgggcacgctgaagatcgagtagggcgagacgatttccgcgcgcacgccgctttcttcccagacttcccgcagcgcggcctgttcggtggtctcgccactttccatgaagccggccggcagggtccaggtgcccgggcgaggcgggattgcccgttggcacaacagatacttgccgtcctgctcgatgatgcagccggcgatgatcttggggttgatgtagtggatatagccgcagccccggcacatcaggcgctcatgggtatcgcccggtggcaactggtgaccgaggtcactgctgccgcaggtcgggcaaaagcgcgggctgggcatggtcagtggcctatgcgcggttctttgagggcgatgggcagggtgatctcgggcagcttgccggtctcttcctgtttgcgcttgaggtagtccagggccacggcagcggcggcgcgcacgtgatcgacgcaggcctggtgcgcggcaagcgggtcgccactcttgatcgcctggaccatgcgttccatttcctggttactgctggcgcggcggttttcctgggacaccgaggtggcgcgcaggtagctgatacgggcctgcaactggcgcaactgggtcgctgcgacatggttgccggagccttccagcagcacatcgtagaacccttgcaccgaatcgatgacctgttgcagttcgccgtccttgagggccttgcggttctcctccagggctttttccagggccttgatgtccttggccttggcgcgcagggtgaacagctgcacgatcaggccttcgagcacgcaacgcagttcatagatgtcgaccgcatcggccagggtgatgatcgccacctgcgggcccttggcatcggcgaattccaccaggccttcggattccaggtgacgcaaggcttcgcgcaccgaggtgcggctgacgccgaggcggtcgcacaggtcgcgctccaccaggcggtcgcccggcaacaactggaagttcatgatggcgctgcgcagtttctccagcacgatttcccgcagggtgaccgggttgtgattgaccttgaagctgtcgtcgagtggcaggcgtttcatgggggctgctctgtatgtaacggttaacagggggccgatcaggggccgaaattgtcggcgagtttatcacgcggtgtcctttaagcgacaaaccctcacggcccccagcctgcctcaggccaaggccggcaatggccccagcttgcccttgtggtagatcatcggcgtgaccggttgtgcgggcaggatcaggttcttcaccgcaccgacgatgatcgcatggtcaccaccgtcgtattcgcgccacagctcgcactcgatgatcgccgtggccttggccagcagcgggttgcccaggtcgctgaggtgccactcgatgcccttggccttttccttgcccttgccggcaaaggcgtaggcttcggcggtctggtcggcggacagcaggtggatcgcaaaacgcttgctgtcgcgcaggatcgggtaagtgtccgaggcatagttggggcagaacagcaccagcgccgggtcaatcgacagcgcactgaacgcgctggcggtgatgccgacgatgccgccgtccgggtcgagggtggtgaccaccgtgacgccggacgggaaggagctcatgacgtctttgtaaatgccgggttcgatcatggtcggggtctcttagcgcatcacaaaaggatcaggcatgggcgcctgggacaggttgatccacaccgttttcagctcggtgtaggccagtaccgaatctatgccgctctcgcgtccgtagccgctgttcttgaagccgccgatcggcgccatcgcggacacggcacggtaggtgttgacccagatgatccccgagcgcacgtcccgggccaggcgatgggcgcggccgaggtcgcgggtccagatgccggcggcgaggccgaactgcgagtcgttggcaatggccagcgcttcggcttcatccttgaagcggatcaccgaggcgaccgggccgaacacttcttcctgcatgatcttcatcgaattgcggtcgcattcgaacagcgtcggctcgtagaaccagccttcgcccaggccctgtgggcgcttgccgccggtgcgcaggcgcgcgccttcggcaattgcgtccgccaccaggccttcgaccacggcaagttgctgcgcggtggccatgggccccatttcgctggcgtcatcctgcgggttgccgatgcggatgcgctgggcacgtgccaccaggcgttcaacgaattcgtcgtagatttcgtcctgcaccaacaggcgtgaacccgatacgcaactctgcccggacgcggcataaatgccggcaatcgcgccgttgatggcgctgtccaggtccgcatcggcaaagatgatgttcggcgacttgccgcccagttccagggacagcttggcgaagttctccgcgctgctgcgcaccacatggcgcgccgtggccgcgccgccggtgaaggcgatcttgcgcaccagcgggtggcgggtgagggcggcgccggtgctcgggccgtagccggtgaccacgttgaccacgcccgccgggataccggcttcgagggccaggcgcgccagttcgaggatggtcgccgaggcgtgttccgacggtttgatcacgatggtgttgcctgcggccagcgctggcgcgagtttgatcgcagtcaggtacagcgggctgttccacggaatgatcgcggcgaccacgcccatggcttcgtgcacggtgtaggcgaacaggtccggcttgtccagcggcagggtgccgccttcgagcttgtcggccaggccggcggtgtagtggaagaactccggcaggtagctgacctggccacgggtttcgcggatcaacttgccgttgtcgcggctttccagctgggccagttgttccttgttctcggcgatcaggtcgcccaggcggcgcagcagtttgccccgtgcggtggcggtgaggccgcgccaggccgggctgtcgaaggcggtttgcgcggcctgtacggcgcgctccacatccgcttcgtcggcgtcaggcagttgcgcccagggttcggccagggccgggttgaggctgtcgaaagtcttgccggacagggcatcgacccattcaccgccgatgcacatctggaagcgtgcgagtgtcatgcaacgatcccctttattggattgttttgggcgtacacggtctctagaaaacccagcagcaactggttgaccaggcgcggcgattctaccggcatcatatgccgttgttcggccagcaccgcaacggtggcgccggggatgcgatcggccagttggcgcgccatctccggcgtcgaaccggggtcgagttcgccggtggcaaccagggtgggggcgcgcagcgtcttgaggtcgtcggcgcggtacatgtcctgggtggcaaacagctcatacgtggtgaggtaaccctggggatcattgcccgccagggtttcgcgcaaggccgcgatctgcgccgggttggccgcctggtactcgcggctgaaccagcgtgacagcgccgcctcggcgttggcgtccggcccgtgttcggcggcctgggcggtgcgcgcgatcacgccggcgcgctgttccgggctgcggttgaacacactgttgagcaccaccaggcccttgaggcgttcggggtagtgcagggcaaacgcccgtgcgaccagaccgcccatggaaaaaccgattaccgtggcctggggcacttgcagatggtcgagcagttccagcagctggtcggcataccccagcaacggcgtgccggaggccgggcgcgggctggcgccgtggccgagcatgtcgtaggtgatcacgcggtagtgcgtggccaggccaacgacttgcccgccccacatttctttattcaggcccacgccgtggatcaaaaccacaggctggccttggccggtcgccagataactggtgccagccggggtgcgttcagcggtgagccgaatcatggagcgctcctgcatgccttttcttattgggggtgccggcctggcttactgagccttttcggcagccagttcttccaggtcgatgtaacggttgccgatgcgtgggtgcaggcggccgccatcggcgcaacccagtaccacgacgatttcgtcggcacgcggggcatcttcgatgcgcatttccagggtgatgtagtgcgagcgcaggccttcgtcatccttgtgcatcatcgggacctggatggaagtgcccgggccgccgcgcttgttggtgaagctcaggtagctcttggctttgaccgcttcacggtagtgattgccgaagcgcagggtgtggatgatcgcgctggcgtgctcgatctcgccatcggcaccgaccacggcagctttgccataggcttcgatcttgtcggcaccgccaatgatgcccaccaggcgctcgaccatcagcgccccgaggtcggagcagttggcacggatttccggcttcaggtcttcgacgaaaccacggcccagccatgggtttttcagcaccacggccaggccgaccatggtcaccggggtatcagcggccttgccgccttcgatgaaggtttcttctgtgtagctgacgatcttgcggatttcgaaactcatgagcggctccatcaggtgtgggggagtgggttgcgtatgatggtataccataatacgcaaagcacaagcgtcgcgaatgagtttgcgtggggtgaggcgatagagggtggtgtatgaaggtcttttcgaggtgatgttaaaaaatgttagattgaaaaaatacttcacataatctgttcattggtggatgatcggccccaattccaatgcggctcgccggtgtggtgtcagccgccgttttcccctggagtacctatgaataataagaatgtcggtgtgatcggtttgggcgcgatggggctgggcattgcccgctcgctgttgcgcgctggtttcagtgtgcatgcctgtgatgtacgtgaggcagtcacccggcagttcgccggggaaggcggagtggcgtgctcgtcaccggcgcagatggccgaggcctgtgatgtgatcatcaccgtggtggtcaacgccgagcagaccgagactgtgctgtttggtacgggcggtgccgtggcggcgctgcgccctgcgagcctggtgatcggttgcgccaccgtggccccgacctacgccgtggacctcggccggcggctgggcgaacacgggctgctgtacctggatgcgccgatttccggcggtgcggccaaggccgccgccggtgagatgaccatgatgacctcaggcccaaaggccgcctatgccaaggctgatgcggtgctggcgggcatggccggcaaggtttatcgcctgggcgacgtccatggactcggctccaaggtcaagatcatcaaccagttgcttgccggcgtgcatatcgcggcgtctgccgaggccatggccctgggcctgcgtgaaggggtggatgccgatgccttgtacgaggtgatcacccacagcgccggcaattcctggatgttcgaaaatcgtgtgccgcacatcctcaaggccgactacacgccactgtcggcggtggatattttcgttaaggacctcggcctggtgctggataccgcccgtgccagcaagttcccactgccgctgtcggccactgcgcaccagatgttcatgcaggcctccagcgccggttttggccgcgaggacgactcggcggtgatcaagattttccccggtatcgagttgccgactgccaagcccgaaccggtgtaaggaacattttatgactgaccacaccacacgcccgttgctgggttgcattgccgacgatttcaccggtgccaccgacctggccaacatgttggtgcgcggcggcatgcgcacggtgcagagcattggcatccccagccgagaagttgcagacggcctggatgcagatgccattgtcatcgccctcaagtcgcgcaccacgccggccgcagacgctgtcgaggaatccctggccgcactggaatggctgcgcgcgcagggctgcgaacagattttcttcaagtattgctcaacgttcgactctaccgccgccggcaatataggccaggtcagtgaggccttgctcaaggcgctcgatgctgatttcaccctggcctgcccggcgttcccggaaaacggtcgcacgattttccgtggccacttgttcgtgcaggaccagttgctcaatgaatcgggtatgcagcatcacccgctgacacccatgtgcgacgctaatctggtgcgggtgctgcaaaaccagactgcattgccggttgggctcctgcggtacgacgcggtcgccgccggtgtggacgcgacacgcaccaggatcgccgaactgcgcgagcaaggcgtgggcattgccatcgccgatgcgctgtcggaccaggacctctataccctgggcagcgcctgcgccgacttgccgctgctcactggcggctcgggcctggccctgggcctgccgggcaatttccgccgcgcgggtaaattgcgcgattttgatgtgaatgcattgcccacggtcagggggggcgaggtggtgctggccggtagtgcgtcggtggcgacccttggacaagttgcagcctggtgcgaggcgggccgcccggcattacgcatcgatcccatcgccctggccgccggtgaaccggtggtggcgcgggcgctggcctttgctcgcaacagtgcgcacaccgtattgatctacgccaccagcaccccggccgaggtcaaggcggtgcagcaacaactgggcgtcgaacgtgccggcaccctggtagagaacgcattgggcgagctcgctgccggcctgcgtgagcagggagtgcgacgctttgtagtcgccggaggggaaacctccggtgcggtggtcaaggccctcggcgtcagcctgttgcagattggtgcacagatcgaccccggtgtgccggccacgctcagcagttccgccgaaccgctggcactggcactgaaatcgggcaacttcggggggcgcgagttctttgccaaggcccttgtgcacctggcaggaggtgcccaatgactggcatcgacgaacaggccctgcgcgaagagatctgcgatgtcggccatagcctgtatcaacgtggctataccgtcggcagcgccggcaatatcagtgcgcgcctggatgatggctggttgattacgcctaccgacgtctgtctggggcgtcttgcacctggggcgattgccaaggtcaacctggaaggcgagtgggtgtccggggacaaaccttcgaagaccctggccctgcaccgtcaggtgtatgaccgcaatccctcggtgggcggggtggtgcatacccattcgacctacctggtggcgttgaccctggccggggtgtggcagccagacgctattctgccgccgctcacgccctatcaagtgatgaaggtcgggcacattcctttgatcgactaccagcgtccgggctcgcccaccgtcgccgagcaagtggcgcaactggccaacagcgtgcgtggggtgatgcttgaacgactggggccggtggtctgggaaagctcggtggccaaggccagttacgccctggaagagttggaagaaaccgccaggctctggctgatgagcaacccccggcccgagccgctgagtcgggccgccttggatgaattacgcgagacgttcggcgcgcactggtaagccgtagatcgatattgcaagcctcccgcgagacccgcctgcggatcgtgacggggggcggcttgcaccaaaaaacaataacaacaggacattcccgaatgagcccactgattttgatgttgaccgccggcgcgggtatcgcgctgctgctgtttctggtcctcaagtacaaattccagccctttgtcgcactgatgctggtcagtattgtggtggcgctggtggccggggtgaaaccggctgatctggtggcgacgattgaaggtggcatgggcaagacccttggtcatatcgcgatcatcattgccttgggcgcgatgatcgggcggatcatcgagctgtccggcggcgccgaagccttggccaagtcgctgatcgagcgcttcggcaacagccgtacgccgctggctttgaccattgccggattcatcatcggcgtgccggtgttctttgaagtcggggtgattatcctgatgccgctggcctacggtgtggcacgccgggcacgcaagccgctgctggtgtttgcgctgccgatgtgtgcggcactgctcacggtacatgcgttcctgccgcctcatccgggtgcggtggcggcggccagccaactgggtgcggacctgggccgggtgctgatgttcggcctgccgatcaccgctttgctgtgttacgtcggctaccgcgtggcggcgcgcatgactcgccgcttttatccgatgaccgatgacattcgcgccgaagtctatggcccccatgtgaccaatgaagacttgcgggcctggaccagcggcagcaaccaggccgcgcaacagaacgccgtggccgaatcccacatgggcctggaggagtccaccagtgccatcgccgccaagttgcctgcggcgcctgcgccggggttcgggctgatcgtcagcctgatcctgctgccgattgtgttgattctactgggcaccctggctacatcattgcttacgatagagtcgacgttgcgcgccgtgatgaccgtgcttggcgcaccattggtggcgctgttgatcgacaccttgctgtgtgcctggctgctgggctcgcgtcggggctggagccgcagccaggtgtcggatgtcatcggctccgccttgccgggcgtggccatggtgatcctgatcgccggcgctggtggggtgttcggcaaagtgttggtggacaccgggatcggcgcagtcgtgtccgatatgttgcgcaccaccggtctgccggtgctggccctgggcttcctgttgaccatgctgctgcgcgcggtgcagggttctacgaccgtggccctggtgactaccgcaggaatcatcagcccgctgattgccaccctcaacctcacgcctaaccatatggcgctgctgtgcctggccatgggcggtggcgggctggcgatgtcccatatcaacgatgcaggctattggatcttcaccaagctggccgggctgaatgtggcagacggtctgcgtacctggacagtcatcaccacgttgctcggcaccctggggttcctgatgaccctgctgatctggccatttgtctgatttctaggagcttacatgcctcgttttgctgccaacctgagcatgctgtacccgcaatatgatttcctcgagcgcttcgctgcggcgaaagccgatggttttgatgccgtggaatacctgttcccctacgattacagcgccgccaccctcaagcagcgcttgagtgataacggtctggtccaagtgttgttcaatgcaccgccgggtgactgggcggcgggtgagcgaggcattgccaccttgccggggcgcgaggccgagtttcgcagcggcttcgaccgtgccctggaatacgccgcggtgctgggcaatacccgtgtgcatgtgatggcggggctgttgccgtcgccaagcctgcgcgaacgccatcacgccgtgtacctggagaacctggcctatgcaagcgctgcggcggccgaggttggcgtgacggtgttggtggagccgatcaacccccgtgacataccgggcttctttctcaatcgccaggaccaggcccaggcgatctgtcgtgaagtcggcgcaagcaacctcaaggtgcagttcgactgctatcactgtcagattgtcgaaggcgatgtggcgaccaagctgcgtcgtgacgtcgacggcatcggtcatatccagattgccggagtgcccgaccgccacgagccggacctgggtgagctgaactatgggttcctgttcgagctgatggaccagttgggctacaccggttgggtcggctgcgaataccggcccaaagccgatacctcggctggcctgcaatggttgcgggactggaaggcccgctgatccgaaacatcccctgcataaccggtaagcaggggggccacaataaaaacaaaaataacgggagttcccctatgcagcacttcaccgtccggcctgctccaggctggctgtttgcgttgtcttgtgtaccttcgatgctctgcgctgcaccattgccatcggcgacggagggcgattgggtcgcgcccgagttcacttttcacacgggtgaaaagctgaccaacctgaaattgcattacctgacgctgggcgatccggctcacccggcggtcctgtatctgcacggcacgtatcgacctggcagcgacgtgctgggcaaggatttcggcggtgagttgttcgggcctggccagccgctggacgccagcaagtactacattatttccaccgatggcataggggtcggccagtcgacgaaaccgtcggatgggctgcgcgccacgtttcccgcctacaactatgccgatatggtccaggcgcagtatcgactggtgaccgagggcctgggggtcaagcacctgcgcctggtcatcggtaattccatgggcggcatgcagacctggatgtggggccagacctggcctcagatgatggatggtctggtgcccatggcatcgcagcccacacagatgtcatcacgcaactggatgatgcgtcggctgctggtggagtcgatcaggcaggaccctgcgtggaatagcggcaattacacccagcagccgccttcgttacgtctggccaatgcgctattcagtgtaggcaccagtggcggcaccctggcttaccaggcggctgcgccgagcagagcgctggccgacaagctggtggacgagcgcctcaacgctgcgcaaacggctgacgccaacgactttatctaccaatggcaatcgtctgccgattacaacgctgcccccgggctgggcaatatccaggccccggtactggcgatcaattcggcggatgacgagcgcaatccgcccgaaaccggcactctggaggcgtccctgaaacacatcaaggacgcgcgtttgctgctgatcccggccagcgctgagacgcgcggccatggcactacggcgatggcgaagttctacacccgggagttggcggcgttcatgcaacacaccgagcaggtacgccaggcgcgttaacacgccgtcgggtcacgccggcgttggatcgcccggcagcatcagttcgatgccgcgcttgcggataccgtcagcggccgccggggccagggcgtcgtcgctgatgatcacatcgaacggttccagcccggcgatgcggtacatgctgaaggtgccgtacttggaactgctggccaccagtactacttgagcagctgattgcatcgccacttgcttgacctcgaccttcagcgccgagggggtggtgatgccacggtgcaggtcccaggaactggtggacacaaaagcgatatccgtgaccacctggcgcaaagtcgccaccgccagcccgccgacgcaagagtgattgtcatggtccagttggccaccggtgtggatcaccgtgacctggggcgcatccatcagggcctgcacgatcccgaaatcgttggtgaccaccgtcatccccgaaagcgccttgatataggggacgatctccagggtgctggtgccggcatccaggtacaccgtcatgtccgcgtgcagcaaacgtgctgccagtcgtgccatcgcctgcttttgtggcaattccactacggctttggattgatggctcggctcgctgtgcaactggctggcgatcctgacgcccccggtgacggagtacgcccggccttcctgttccagcagtgcaatgtcacggcgtacggtcatgtgcgagcagtcgaacatctccatcaactggtgcacgctcatcacctgatgcttgcgcaactgacgcaggatttgctcgcgacgctgctcgggaatcatcggcgtgctgctgtcgggggcagtgtccttgggggtgggcattgaggctccgggtcggtctgggggctggggcacatagtagcgaatatgcgttccgaggtgatgcacttcagtcagtcatcagtgcgtcatcgactgtgtccaggtgcttgaagcgttcgatcagaaagtcaatcaggctgcgcacccgtgccgacaggtgcagttgttgcgggtataccgcgtacacatcggcgcgggtgggggtctggtcctccagtaccaggcgcaggcgcccgctgcgcacgtagcgagcgatgtcccattcggcgcgcagtagaatcccgtagccctccagtgcccagttcagcgccacctcgccgtcgttgcagcccagggcgccgtgcactttgatgttgtccgtatgcccgccgtgggtgaacgaccacacgccatacggcgattcgttctgacggatgaagatgcagttgtgctggtgcaggtcggcgagcttttcgggtgtgccgtatttgtccaggtacagcggcgaagcgcacagcaggcggcggttggaggcgatcttgcgtgcatggaacgccgcgtccggcaggctgccgaagcggatgccgaggtcgaaaccgtgggtcgtcaagtccagcgggtgatcgctgatttccagctggatttcgacctccgggtactgcgcaaaaaacgctgccagggccgggccgatataacggcggccgaaccccagcgaggcattcacccgaatcaggcccttgggcgtggcgcgactgctgctgagcacctgctccagttcgtcgatctgggtgaggatgcgcgccgcatgggtgaaatacagctcaccttcggaagtcaggctcatcgagcgggtagtgcggttgaccaggcgaatgcccaggcgcgcctccagtgccgtcaggcgtttgctcactgccggcggagtcacccccagttcgcgcgcggtggcgaccaagctgcctttgttggcgagcaggtagaaaaacgacaaatccagggtttggctcattcgtaactcaaggttatttatgtagtgatttcgagtcgatcatgctgctttgatcgctacatatactccgatcaccccccgcttggacagcctggctgcggcgggacacaacaacaaacgtgacgaagcggagtgaatgatgagtgcatacaacattgcggcaattccaggagacggtatcggcgttgaagtgatcgccgcgggcgttgaagtcctgcaaagcctcgcgaacaaagccggctttgcaatgaacttcaagcatttcgagtggaactccgacaactacctgaaaaacggctactacatccctgaggggggcctggaagagctgaagaccttcgacgcaattttcttcggtgcagtgggggccttgaacgtgccggaccacatctccctgtggggcctgcgcctgccgatctgccaaggcttcgaccaatacgccaacgtgcgcccggcgcgggtgttgccgggggtgaaaagcccgttgcacaacggcgaccagattgattgggtggtggtacgggaaaactccgaaggcgagtactccggcaacggcgggcgggtgcatcgcggcttgcccgaagaggtggccactgaagtgtcggtgttcacccgtgccggtgtggagcgtattcatcgttttgccttcgacctggcccgcagtcgcccccgcaagcatctgaccctggtcaccaagtccaatgcccagcgtcacggcatggtgctgtgggatgagattttctacgaagtggccaaggacttcccggatgtgaaaatcgacaaggaactggtcgacgccgtgaccacgcgcatggtgctcaaaccgtcgaccctggatgtgattgtggccaccaacctgcacgctgacatcctttccgacctcgccgccgcactgtccggcagcctgggtattgcgcccacggccaacctcaacccttcgcgccggttcccgtcgatgttcgagccgatccatggttcggcgttcgacatcaccggtaaaggcgtggccaaccccatcgcgacattctggaccgccgccatgatgctcgaacacctgggcgagccagccgccgcccggcaattgatgtcagccatcgaggcggtcaccgaaagcggcctgcacacccctgacctgggtggcactgccagcacccgccagatcaccgatgccgtcatcgagctgatcaaccgctgattcacgggagtactgcggcacaacgccaagggccggcggtcacgtccgcccccctggcatttcctgacaacaataagaatcagggccctgtcatgaaaagaatatttggcaaactctatgtgcaagtcctcatcgcagtcatcctcggtgcgattgtcggggtgcttgtgcccgacaccgggaccgcgctcaagccattgggcgatgcatttatcaaactgatcaagatgctcctggcaccggtgatcttccttacggtggtcaccggcattgccaagatggagaacatgaaagagctgggccgcgtgggttttcgcgcgttgatctacttcgaagtggtatccaccctggccctggtggtcgggctggtggtggtggatgtgttcaagcccggcgccggcatgaacatcgatgtggccaccctcgacacctcaagccttgccacctacaccacggcggtcaagcacgcctcgttcatggactttgtcatgaacatcattcccgacaccctggtggatgcgtttgccaagggcaatgtgctgcaaatcctgctgttttctatcctgctgggcgttgcgctggctgctgtggggccgcgcggtaagccattcgtggacacgctggacagcctcatgcagggcatgtttcgtatcgtcaacatggtcatgcgcctggcgcctatcggtgcgtttggcgccatcgcgttcaccatcggcaagtacggcttcggttcgttgttttccctcggcaaactgatggcctgtgtctacctgacgtgcgcggtgtttgtgatcttcgtgctggggccgatttgccgctacagcggcttcagtttgtggaagttcctcaagttcatcaaggaagagctgttcaccgtgctcggcaccagctcgtcggagtcggtattgccgcaaatgattgccaagatggagagggccggggtgtccaaaccggtggccggcatgatcatcccctcgggcctgaccttcaaccccgacggccaggcgatctactacaccatcgccgcgattttcatcgcccaggccaccaacacaccgttgaacctaactgatcagttgatcgtgctggcggtgttgatgttcacctcaaagggctcggcgggagtgaccggctcaggctttattatcctggcggcaacgctgtcgtcactgggcactattccggtggcgggcatggtgctgctattgggggtagaccgttttatgtcggaagcgcgggcgatcaccaacaccatcggcaatggcgtgggcaccatggcgatcgccaagtgggtgggggcgttggatacggtgaaaatgcgcaaggccctcgacggtgaagttgagagcccaggtgcacattcagaacttgaatcgccccaccagccccttgagctgcccggaaatatccgtcaaccgacctgacccggtctgcgccgaatgggcaaacccttcgaccagttgcgcatcggcatggatttgcgcgatgtgccggttgatctcttcggccacctggtgctgttcttcggcggcggtggcgatctgggtgttctggtcgcggatcgagtccaccgagccacggatcttgtcgaagctgtcgcgggcctgctggatgcgttccacgctggtgtgcgacaccagcaggctgccttgcatctgctgggtcacttcctgggtgcgacgggcgaggttgccgagcaggctgtcgatctcgccggtggagtcggcggtgcgacgggccagggcgcggacttcgtcggcgactaccgcaaagccgcggccctggtcaccggcacgggcggcctcgatggcggcgttgagcgccagcaggttggtctgttcggcaatcgagcggatggtgtcgaggatggtgttgatgtttttgctgtcctgctccagctgctgcatggtctgggtcgagcgttgcaggtcttcgctgagctggagcacgctgccggtggcttcgccgatgtgctgctggccgtcgtgcacatcgcggtagccttcatcggcactggtggcggcggcgctgcaggagcgcgcgacttcgttggcggtggccaccatttcgttgaacgcggtgctgaccagttccaccgcttcacgctggcgaccggcggcctggttcatgttgtgggcgacttcgctggtatcggcggcggcggtttgcaggtcggacgaagcgttgccgatgcgctgcaccaactgggcgatcatgctcaggaactgattgaaccagccggccaggctggcggtttcgtccttgccctgcaccttgagctggcgggtcaggtcgccttcaccttcggcgatctcttgcaggccgtcggccacgccgcgaatcggacgtacgatcacgctggcgaaactggcgccgacaatcgcgaagaccacggccagcgcagcggcaatcgcagcgatcaaccaggtaaggcgggtcgcgccggccatcacttcgtcgcgcttgatcaggccgataaagcgccagcccaggtctttggagctgaccatgttggccatgtaggccacgccatcgatgtcgatctggctcacgccgtcgccgcgcttggccagttcggcgtagttggggccaaggtcggccaggggcttgaagttgtgcttggcgtcgctggggtctaccagcacgttgccgttgccttccaccagcatcaggtagccgctgtcgccgagcttgatgttgcgcaccagttcggtgagctgcttgagcgagacgtccaggccgaccacgccgaggatcttgccggcggcgtcggtgacggtgtgcacggtgccgatcagcgtcacatcgtccggcgcccaatagtaggcgccggtgcgcacggttttacccggcgcggcgatggccgcctggtaccacgggcgtacgcgtgggtcgtagttgttcagcttggtgtcgtcgggccagctggcgtagccgccgtcggcgaggcccagggacaggtaggcggtgctcggatggctcttggcgaactggtcgaaaatctccagcagcgcggtgttggtgggggtgagggggatctgtgcggcgtcggcgccggcgtagctcttgaggtccttggccgcgacaacgcgcgggtccttggccacatactcgacgttctggctgatgccctcgaagaactgcttcatgccattgtcgatctggcggatctcacggccactgctgtcgaggaaattggcctgggccccctcgcgcagattcaacacgaccagcacggccaccaggataaccggcacgcacgcgatggcggcaaatgcccaggtcagcttttgcttgatattcatgacttcacccgcgggtatttataattttggcaaggagaaaacagtagcgtcgagcgtcgcatgtgttgtttttagggggtgtggccatgcgtaccccctgtatatcgactgcgcgggcacgcacttgagggccgagagaaggtttaaccgatgcgttcgccacccagcgcatcacgctgcatcgactgcaggtttttctcgatggtttcgcagatggtgtccatctggatctggtgttcgctggagttgaacgggctttgcaggtcggtgccgatgcgctcgatggccagcagcatgaaacccaccaccgtcgaggccagcggggtgaaccagcccagggactccaccaggcccaccggtacgatcaggcagaacagcgagataaacagccgtgggaagtacacgtaagggtagggcagcggggtgttggcgatccgttccatgccgccctgggcgttggacaagtccaccagggtcgactccagccgtgccaggcgaatgctgtcaaggtgaccgaccttgtactcgcgggccagcaacgccgctgaaccggtaaggatatcgttggcaaagttgttggtggcgccgttgcgcgcaaactcgtcaccagggataaacgcgcggacttcttcggggcaaggctggcccttgaggtgcgcggccaggcaattcacataggccacatgacgacgcagcagggtggccttgaccgggttcacttcgtcgtcggggtcgtccagcagggtcagtacctggcgcgcaaaactgcgcgagttgttgaccatcgcgccccacagtgtgcgggcttcccaccagcggttgtaggcactgctgttacggaaactgatcagcaccaccagcgccgaacccagcagggtcaggggcatcagcggcagattgatcttgtaggtgagaaacaacatgaagtccacggtgacggcgacgtcccacagcagcagccagaacagcgcccagccaacgtagcccatggtcttgatgatcaggcggtactttttgaggatggcggctttcaaacggggacctcgcggcgaacggtaagcaagagtgcttaagctcggacgcgggtggcggtgaaaggttcgccccatggcctgaatcgtttaagtggtgcgcaccggctcccgtgagagtcttcgcagttcttccagtgccgccaggattcaatggcatcggcgaacaggtcgattgaacagtttcatcacaacgcttggatatatttaaaggcagcgaagcaccgcagctgtcatgggcgtgtatgagtgggttgctttagggacgccaatacgttttggaacaattttggtagcgatgatgtctgtcgggttactcgcgatacattgcgctcgaggcaaaacgccatcactggtggtgtttacgacgtgagttgttgtgagacctggttgcagaagtgctgcgccatcgatcagtgaattccagtaggttgatcagggctctttctcatgtgcgtcagttcgttgaagtgggcgttggatcattccgcgcaggtgttggaacgtcacggggaatttgaatgcagtattcgcgcgcactacgccattctgctgggtccctattcaaaacgaccgtttttctacaagacagcgctgaagttcaaccgtttgatggtgtctttcacgctgctgagtgaatatttctccaagcccgcgccattgttgtccgacgtgaaagcgttctgcgtggctcgcggtttctgttccaggaacagcctggagtcgatcttcctgctgttcagggccctggggttcatgaaggtcgctggccaccctgacgacagccgttttcgggtgttcagcccatcgccgcaggcttgccatgaagtcaggtcgatgctcaattccgtggtgcagccgctgggaccaatgtgccccagtgaagcgcaggtccagcggatgagtgagttggacgaccgagccttcctggcactttatttcaaaggttttgccacccttctttcaaataagctgaccatcgatgtattgctgccggaatgtgactggctggttaaccgtgatgccggacatatgctgatgttggcgatttataacgatgcctgttccttggactgtcagggcgcaagtttcaggacgtcttcttatctttcactggcgacgcgactttcagtgtccaagacccatgtgattcgtctggttcaggagggtgttgaaaaaggttgctttaaagtgcattccaagacgcagttggaagtattgccgccctttgtaaagttggtgcgccgtttcatggcgtattcatttgcaatcaccctgcttagtatcgagttgggccaagccaggaaaatataggcaacttatgcgcagggagtgttgagatgccggctgacttaaagctcaggccaaggatgcagaggttattgtcgcccgctgttgcccaggcggaatggataggcctgattgcctggtggtgggtgctcttggtggatccggtgctggagttcgggtggtacaccgtgctcattaccgtctgtttgacagcgttgtgtcgatttcaccggcggttggccaatttcctggcctggcgggcgttcggtgtggtctatatggcggtgttggccgggggctttgcgttggtgatgcagaccgatcaggcgttgcaggtatttgctctaccgctggcggtgattctggtgctgagcagtgccttgctctttatcgcagtccaggatttcttgataggcgctgcattgatctggtcgatgctgtggccagctgttcatatgtcgatctacgccggggttgaggtttacctggtgatgttctgcctggcgtcggtgtcgatcggcttcatcttgaattattcctacttgaagaacctgcgttccgtattgctggtcgagagtgagttccgggaactggcagaaacggattacctgacctccatcctgaaccgacgggcctttatcgagcgtttcgcccaagtgatcgccgacggccagggcggctacttcatgatgttggatatcgatagcttcaagctgaaaaatgaccagtttggccatgatgtcggcgacaagattctctgtgcgatggctcattgcctgaaagccactcctggcagcgacagcttcggtaggatcgggggagaggagttcggtgtcttgctggtgggtgatgacccttgggcggccacggattttgccgcgcgcctgctgcaagccattcgtggcagtgtcccgccaccccatcactacacgtgcagtgccggcatgacgcatttctcggcgggcgccgatatgtcagcggtactcaagtgcgccgaccgcaacctgtacgccgccaagcgcaatggcaaggactgcgtgtacctggatggcgagccggtggctgcttcccggtgaaacgcaaagacgggcctcagtgctgggccagaatgctcgcaagcaagccgggaaagcggccttcaagatcttccgcacgcaacgcattcagatgagtggtgcccacgctgcgtgtctgcaccaacccggcatcgcgcaacacccgaaagtgatgggacatgctcgacttgggccgcccgccgtccagttcgccgcaggtggcctctggcacgccggccaggcagcgcacgatttccaggcgcaccgggtcactcagggcgtacagcacgcgctcaagggtcaggtcttgcaggggggggtgtttgaaggctcgcatgaaacgaatcataacagggggctatcgttgaataccatagttcgattaccatcgaactatcgaatcaaccacctgctcactggagtcgcctcatggccgcattgttcgaaccgttccaactaaaagatgtcaccctgcgcaatcgcatcgctatcccgccgatgtgccaatacatggccgatgacggcatcgtcaacgactggcacctcgtgcacctggccagcatggcccgtggcggcgccggcctggtggtggtcgaagccactgctgtcgcgccggaaggtcgtatcactcccggctgcgcgggcttgtggagtgatgcgcatgcccaggcgttcgtgccgatggtccaggcgatcaaggccgctggttccgtgccgggcatccagatcggccacgccggccgcaaggccagcgccaaccgtccgtgggaaggggatgaccatatcgccgcttccgatgcccgcagttgggaaaccattgcaccgtcggctatcgccttcggcgccaacctgccacaggtgcctcgcgccatgaccctggacgacattgcccgggtgcgccaggacttcgtcgacgccgcccgccgcgcccgcgacgccggttttgaatggatcgagctgcacttcgcacacggctacctcggccagagtttcttctccgaacactccaaccagcgcaccgatgcctacggcggcagcttcgacaaccgcagccggttccttctggaaaccctggccgacgtgcgtgaagtctggccggaaaacctgccgctcaccgcacgtttcggcgtgatcgagtacgacggccgcgacgagcagaccctcaccgaatccatcgaactggcccgccgtttcaaggccggtggcctggacctgctgagcgtcagcgtcggtttcaccatccccgacacccacatcccgtggggcccggcgttcatggggccgattgccgagcgtgtacgtcgcgaagctggtatcccggtcacgtcagcgtggggcttcggcacgccgcaactggcggaaggtgcgttgcaggccgggcacctggacctggtgtcggtggggcgtgcgcacctggccgacccgcattgggcgtattttgcggcgaaggaactgggggtcgagaagtcctcgtggaccttgcctgcgccttacgcgcattggttggaacgttatcgctgaggcggtagccggatgatggaagccactcccaggagtggctttttttttgcgtcgtcttttgtagcacgtcgatacatggcggatactcaaaaaaacatcaatgagaatggatatcaattgttaatgatttgacatatcatgcgcgccaaaataactggctgatatgccgccccatctggctctttcactaggttcaactcatgcgtcgtaccctgctttccgtgtgtgtgcttcaggcgttttcccccttgagctgggcggaggtcgaaccggttgaaaaagccgccatcgagctgcaagccaccagcgtcaccggcacggccgactatgaaaccgcccagggccccgtgcagggctatcacgccacccgttcagcgagtgcgacgcgcaccgacacctcgatccatgaaaccccgcagtccatcagcgtagtgtccaaggcggtggtcgaagacatcggcgccactcgcctgcaggacgcgctggactatgccggcggtgtcggccgcgccaacaacttcggcgggcagggtctcactaccttcaccgtgcgcggctttaccaccggcgagttctaccgcaacggtttcccgatcaaccgtggctacccgaacatgccggatgccaacaccatcgaacgcctggaagtgctgcgcggcccagcgaccatgctctatggccgtggtgatcccggcggcaccttcaacgtggtgaccaagcaaccgttggccgaacgcacggtcaccctcggcagccaattgaatgaccagggcatgaagcgcggcaccctggacgcctccggcccgttggacgaagagggccgcctggcctatcgcctgaacgtggtgggcgagggcggcgacaccttccgcgaccatgtggaaaccgaacgctacggcatcaccccggtgcttacctggcaggccagcgacgacaccaaggtgatcttcgaaggcgacttcatgcgcaacaaccacccgctggaccgggggctgacacgctttgctactcagaaaggcacggcttcccgcgataccttctggggcgataaagacgtcggcaagctgcataacgacaacagcatggcccagttgcgtttcgagcatctgctcaatgacaactggaccctgggcggtggtttccagtggttggacggcaccttgcagggcaacgccatcgaggccaacagcctggctgccgatggccacacgctcaaccgcaacttcaactaccgcaagctggaatggaccgacaaggacacccagctcaacctcaccgggcatttttccacgggtggttttgatcacaccttgctgactggcgtcgagtttgaggattacgactacaagtcgatcatccagcgttcgtccgccgcctacaccagcgatatcttcaacccggtctacggcaagccgcgcccggcgcttaccagcacgccgactcatgacaaggaaaacctcaagacctacgccgcgttcgtccaggaccaggtggccctcaccgaacgcttgaaggtgctggcgggtgcgcgcttcgaacgcttcgagcaccagtacgagacctacgtgaagggcgggcaaagctgggaggccagcgacaacgcggtcacgccccgtgtcggcgtgacctatgacctgactgagaccctggcggtctacgccgacgccgcgcgttccttcaagccgaacaccggcgccagtcgcgacggtgccggtttcgagccggaaaagggcaagtcctatgaaatggggatcaaatgggaagggctggaccgtcagttgagtgtggacgcagcgatctaccagatcgacaagaagaacgtgttgaccaccgatcctgaagactccaactacaaagtcgcagcgggtcaagtgcgcagccgcggcttcgacctcaacgtcgccggcaacctcacccctgaatggcgcgtgatcggcggctacgcctatgtcgacgccgaagtcaccaaagacaacaccatccgcgtcggttcacacctggccaacatcccgcgtaacagcttcagcctgctcaacgtctacgaattccaggacggtcgcctcaaggggctcgggctgggcgcgggcgccaaatacgtcgatgaacgtgtcggccagacctccaacaccgccttctccatggacgcctacaccgtggtagacctgctgggctactacaaggtcaatgacaaggtgcgcctgaacctggatgtgaagaacctgttcaaccgcgattttgaggaaggcgcgttcggcaacttctacgcctacccaggcgcgccacgcacggtgcaggtgggcatcgcctacaccctgtaaaaccggggcggtgtgcaatccctctgggtgattgcacaccgtattcctcagccctcgaacactgggtgcgacgacctttcaatcgccaccatggcatcggcctggctcatcaaccccgactcttccagaatcgacaacagcgagcgcccttgcgccaccgattggcgtgccagcttgctcacacgggcgtagcctagctgcggaaccagcgcggtggccacggccattgattgagccaggtgttgttcgttacgttcggcatcggcggttatcccactgatgcacttctcgcgaaaccgttggatgccttgggtcagcagcgcaatgctgtcgaacacgcgggacgccaccagcggctcgaagtggttgatctccaactgaccggcctggaccgcctgcgccaccgccacatcattgccgatgacggcgaagctcaactggatcatcgccatgggcaacaccgggttgaccttgcctggcatgatcgacgagccggcctgggcttcgggcagcttcaattcgccgatcccaccgaccggcccggaggacagcaaggtcaggtcagttgcgatcttggccagggacgcggaaccggtgcgcaactcagccgaaacccgagaaaacacatccatgttctgcatcgcatcgaaggcgttcgaggggggctggtactcaatgccagtgacctgtaccaagtgctgatacaccgcggcgcgataagcgggaggcgcaccaaacccggtgccgatcgctgtgccgcccagcggcagggtgcgcagtgtgtcgcgcacgccagccagcgcggtcgccaggcgatgggtgagggcagcgtacccggaaaacagctggcccaggcgcatcggctgggcatcctgcaggcaggtgcggcccaggtgcagaatatcggcaaactgcacggctttctggtcgaagcgcgtagccagttgttccacttcatcgatcaatggcccgagcatcgcatgtgtcgcgatcttcaatgccgcagggtacacatcattggtcgactgcgaggcattcacatggtcattggggtgcaccacgtcatacgaacccgccgcgtggcccatcaattgctgggcgcggttggcgatgacctcattgaagttcatgttggtggacgtgccgccggacccttccagcaggtcaacgatcagcgagtcgtcgcaccggccggcgatcacttcggcgcaggcttgcacgatggcgtcgcactggggctgggcaagtacgccgcaggcgcggttggccagtgcggccgcccacttgcactgggcaaaggcatcgcggaaggccgggtaataagcgatggtcagcggtgatacgctgaggttgtcgaacccgcgcaccgagttcaccccgtacagcttgtctgccggaatctgtacgtcgccgacgtaatcggtttccagccgtgtagcaacagcatcaaaaatactcacgagcatcaccctcatcaaattggattaacgcctccacccctttgtccagggccgtgagcctgggcaggaaggagtggcggatcacatcacgcgccgtttcgcacgcatcggcgaaaaaggcgctgtattcattgcgtcgtgctaccaggtaaagcgagcgttccagttgcaggtccggtgtgaggtgcgcggtcacgttgtcgacccaggcactggcctgcaaaaaacacatggggctggtaacggcccaaccgatgccttcggcgaccatcgacgtcagtgcatcggcgttatccagctccaggcggttgggcactcgtacgttcaggctgcgcagatgacgctcgatctgcagccccacctgggacatccggttgaagcgcaccaccggcagcacattggccagcgcgcgtacgtcctcgaccgtgtggatatcgcagcgcgcttgcctgggcgtgataacaaagtacttttctgaaaacagccgatagcgaatcacgtcattggcgtccatcaacgggtcgctggtgacgatcaggtccaggtcgcgccgcaacagggattcaccttgttgcgggctgagccctgtgcgaatggacaactgcgcgaccttgccgagcaattgccgggtgaacaccgacccgcaggtggcggcgaaggagtccaccaggccgatgcgcaggtcggggttcacaccgcgcccggcgtcgatcacttgtgccttgaggtgggacagttcctcgctcaacaccgagccccgattgcgcagggcaaccccgaatgcggtgagggccatgggccgggtggtgcggtccaccagcaccacccccagttcctcctccaattgacgcaccatctgtgacacgccggactgggaaatacccatgcgcgcggcggccccggacatgctgccttcctcggcaaccgcgatgaacacctggactgcatacatgtcgatcagcctgttcgcagacatcctcaacctcacttgatggtgttattcaatggcaaccttggcgtccgtccgaagaggatcgggcgtgacccccgacaagtcttccttgctggtttctggcgcaaacacgtggcagaacacgccgccgaagaccagcacgccaacgcatacgcccaacgccgcatggacccccacgtgctgcaccgcgactggcagcaggaacgtcgccaccgccgagccgaaccggctggccgccacggccaggccgatccccgaggcccgcagatgggtggggaacaattcgggtgggtagacgaactccaggttgaccgccgccgccatcacacaggcaaaaacgccgaaggcgaggatggtgcccagggggccgaaaccggcgtaggccaatactgccaggcccgcagcactcaagtagaaggtgccgaccaggaatacgcgccgggacagccgatcaatgaccagcagaccgagcagtgcgccgagcaatagcaacacgttgtagaccaggccaccggcaaacttgtcctgcacgttcagggcttccaggactttgggtgcgaatgtgccgagggcgaagaacggaatcacctggcaggtgtagaacacgcaacccaccagcgtatttttgcgccagcgcgggctgaacagttctgcccagctgccacgctgcttgtgcccattggccggggccacgggtgctggcaggaacacatgcgggccgaacttgctgcgcacaatggccatggcttcctggctacgcccgcgagccatcaaccagatcggcgattccggcacgcccatgcgcaagggcagaatcaacagggctgggacgccgctgagggccagcatcacgcgccaggcatccgggccgatatcgcggatggcaaagcccaccagatacgccgccacatagcccgccgcccaagctgccgctagcacactgagcaggcgtccccgatagcggcgcggggcaaattcggtcaccagtgacttgctcacgacatagtcgaagcccagcaccagccccagcagcaaacgcagcgccagcaactgctcgggcgaggtgacaaagaactgcgacgcagagatgacggcgaacaacagcatgtcccaggcgaagattgcccgccggccgaacttgtccgcgataggcccggccaacaggctgccaaggaacagtcccgccaaggacgcggcgcccagcaagcccatccataatgccgtcaactgtaacgggccggccgccatgctgacggcgatcccgataatgcccagtacgaaaccatcactgaactggccacccgtgccgctgaataccgtgcggatatggaagcggctcagcggaaggtcttcgaacgctacttgaccactcattcgtctctccacttgcgtttttatagttgtgggaaccggtgcatcggcaccggctgagagcgagtctagggcgacagcttcacgaaatcagcaggtgccctgtgagtatcaagatagctgatactgagggccgcttttcttgaacaggggacaaagatatgagcgagtacgcgcaactgactcacgagcttgaacaggcacaaagtaggacccacatcacagctgcgacagatggcggccaataagcatttacgtccacccccaatcgatgagaaaagcacgtccattccctcggatatggacatcgcatgcctcgttcaaccctcatcgttcgtgtattcgtcgcgctgctggccagtcttgcgctcgggtatatctggatcatcgtcagcgccaagctggaaatcggcggcgccagcccgaatcaacaacggctgggcacactgccgggcgtgcggccacacgcggtcagccaggattgcaccggagtgaaggtgaccgcccagggcacgtggctggtggggcgggtgacgaatgaatatgaacagctggaaccctcaagcgagcgggtggacttgaatggcttgctcgacggcgaactgcgttcggagccggagaccaccgtggttgcgcgtctgggggctgacggggtgttcaagcaggtcgcccaggtcagcggctcggcctgcctggtggcgagtgcggagggcgcgcgcgtgtttctgctgagttcgctctatcgacccaacgatgtggggggccagaacgcggtgttccgcagtgatgaccagggcaagacctggcgctgggtggccgacgggtttttccccgaggtgagcggtgtggccaccctggtttcgccgtacttctataatcaggacgaggtctgggcctcgcgttgggccgatgacgtcgagccgcaggccggggtgtattactccgccgacggtggcgcccacagcacgccgatcacggtgccacaaccgctggcggtgacccaagactacgcccacagcctgcgcccggatatccaggagtggcgcgattcaaccgaacagctgacccacgtattgcaacaggatgcgcagcacgcggtgatctgggtgtcgcaacgcttctggggcagccatcccgatggcaagagcgacaacctggcgatcggtgtcaccactcgcgtgcagttgaagcgcacggccggcacgtggcaagtcgaggatattcagcgggaaaacggcctgtacatcagcgagcttgcggacaacggcgccgggcgcgtgatcggcctgatcgaccaggggccccatgggcgcgcggtggtcgccgaattgaacaccgcgacgctggcctggaaaacggtgggcgacttgcccagtgtgttctcgcccttgagtgccgatacccaggcgcgtgggctatgggtagggcgcaacagcctggtggtcaatacctacagcgatcataagccgccgcgttggctgtactggtggagcgaggcgagtatctccgccgatgcggtgttctattcgacggactggggccattcctggaagcgtctgtcgctggacgggtacatgggcgtgcgcgggtttgacggtgccagtgatcgggtgttctggagcaaacagaattacgccgacgacaccctcattcaagcctatggcctgcgctgaatcgcctacaacggcgtcaacacgttcatcaccgtatccaacgccacccgcgtgtcatccagttgcaccagcgacgcatgccgcgcgccgagggcgtcgcggttctggatcgcggtgaggatcgccttgtgccggggcaggctcaggccctggatgtcggggcggcggttggtgatgttgatcgactcgcgcaacggcagcgacagcatgttgcacatgtaggcgagcaagtcgttgcgcgtggcgtcggcgatggcgcggtggaagtccaggtcggcctgcagcagctgttcgtgggtctgcgcggtttccatgccctggtaggctttttcgatggtggcgatgtcttcgtcggtggcggtggtcgcggccatggcggcgatctccggttcgaggatgcgccgcacaccggccagggtgttgaagaactcactgtggggtgtggactgcatcaaccaggacaacacgtccgggtctagcaggtgccacttcacgcgaggccgcaccaccgcgcccacccgtggcttggaatacaccaggcccttggcgctgagcacccgcgtggcttcgcgcaacaccgagcggctgacctggtactcctcgcagagcgtggcctccatgggcagccgttcttcgggcttgaagcggccggaaacgatgtgcatgcccaagtcctgaacgatctgggcatgctggctcttgcgcggcttgggcggctggtgatccatgacgacggggaggctctggcttaaagacgcggcatcatagcatcccaattagtgggaatgccgtgggacttccgccccacggcaacccaccaggaagtcaaagtcgcagccctggtcggcctgcagcacatggtcgatgtacagctggcggtagccgccgacgatgaggttctgcggaggcgccaggtctgccatgcgcgccgccagctctgcgtcggggatgtccagatgcaggcggccgttggcgcagtccagttcgatccagtcgccttcccgcaccgtggccaacggaccgccggcagcggcttccggtgccacgtgcaacaccaccgtgccgtacgccgtgccgctcatgcgtgcatcggagatccgcaccatatcggtcacaccctgggccagcagcttggccggcaggcccatgttgccgacctcggccatgcccgggtagcccttgggcccgcagtttttcatgaccaggatcgagttggcgtccacgtccagttccgggtcgttgatgcgcgccttgtacatgtcgaagttctcgaacaccaccgcacggccacggtgctgcatcagctctgggctggcggcggacggcttgagcaccgcgcccagcggggcgaggttgccgcgcagcacgcagatgccgccgtcggcgcggatcgggttgtcgagggtgcggatcacttcgtcctggccgtagatcggtgagtcctgggtgttctcgcccagggtcttgccgttgacggtcagggcattcggatgcgggatcaggttggcttcacccaggcggcgcagcaccgcgggcaggccgccggcgtagtagaactcttccatcaggaagcgccccgagggttgcaggtcgacgatggtcggcatgccacggcccatgcgggtccagtcgtcgaggtcgagttcgacgccgatgcgcccggcgatggccttgagatggatcactgcattggtcgagccgccgatggccgcgttgacgcggatcgcgttttcaaacgcctctttggtgaggatcttcgacagcttcaagtcttcgcgcaccatctccacggcacgcatgccggacatgtgcgccagcacataacgccgcgcatccaccgccgggatcgccgcgttgtggggcagggacgtgcccagcgcctcggccatgcaggccatggtcgatgcggtgcccatggtgttgcaggtgcccgccgagcgcgacatgccgccctcggccgcgaggaagtcatccagggtgatggtgccagctttcacctgttcgctgagctgccacaccacggtgcccgagccgatgtcctggcccttgtgcttgccgttgagcatcggcccgccggtgaccacgatggccggcacgtcgcaactggcggcgcccatcagcagggccggggtggttttgtcgcagccggtcagcagtaccacgccgtcaatcgggttgccgcgaatcgcctcttccacgtccatgctcgccaggttgcgggtgagcatggcggtggggcgcaggttggattcgccattggagaacaccgggaactccaccgggaagccgccggcctcgattacgccgcgtttgacgtgctcggcgatctggcggaaatgcgcgttgcacggggtcagctccgaccaggtattgcagatgccgatgatcggcttgccatggaactgatggtcggcaatgccttggttcttcatccagctgcggtacatgaagccgttcttgtcggcggtaccgaaccactgggcggagcggaggccgggctttttatcaggcatgatcgattctcttattgtatgactatatgttctatgcgtgcttaaacataagcgcaaaaacgctgctttggaagagttgttttgcaaatagtcatactatatagtcgggttcaactgaggtatggccctggcggattttcgcgagaggcgtcccccgagcttctataaaaacaacaatcggagatcgaccccatgagccaggaactgcggcttattcggcgcatcacgctgaaactgattcccttcctgatcctgctgtacctgatcgcctacgtggaccgctccgccgtgggcttcgccaagttgcacatgggcgccgacgtcggcatcggcgacgctgcctatggcctgggcgcggggttgttcttcattggctacttcctgttcgagatccccagcaacctgatgctcgaccgcttcggcgcacgccgctggtttgcgcggatcatgatcacctggggcgccatcaccatcggcatggccttcgtgcaggggccgcacagcttctatgtgatgcgctttctgctcggcgcggcggaagcggggttcttccccggcgtgctgtactacatcacccaatggtttccggtacgccatcgcggcaagatcctcgggctgttcatcctgtcgcaacccatcgcgatgatgatcaccgggccagtgtccggtggcctgctgggcatggacggcatcctggggctgcacggctggcaatggctgttcatcgtcatcggcactccggcgatcctgctgacctggccggtgctgcgcttcctgccggatggccccaagcacgtcagctggatgagcgacgacgaaaaggcctggctcaccggcgaactcgccaaagacctgcaaacctacggccagacccgtcacggcaacccgctgcatgccttgaaagacccacgcgtgttgctgctggcgctgttctacctgccggtgaccctgagcatctacggcctgggcctgtggctgccgaccctgatcaagcaattcggcggcactgacctggtcaccggctttatcgctgcggtgccgtatatcttcggcatcatcggcctgctgatcatcccgcgcagttccgatcgtttgaacgaccgctacggccacctcgcggtgctctacgtgctgggcgccatcggcctgttcttcagtgccgcgctcagtgtgccggtgctgcaaatggccgcgctgtgcctggcggcgttcgcgatgttttcctgcaccgccgtgttctggaccttgcccgggcgcttcttcgccggcgccagtgcggcggcgggcattgcgttgatcaattcggtgggcaacctcggcggctatatcggcccgttcgtgatcggcgcgctcaaggaatacaccggcaacctcgcatcgggtttgtacttcttgtccggggtgatgctgttcgggctggtgctgaccttggtggtctaccgcctgctcgagcgcaagcacgtgctgcccgccgaccaatttgccgccagtgcccgtggcgccacccgaccttaatccaggagaacagtcatgcgtttagttcagttcgagttgcgtaacggtgaccgccgcgtcggcgtggtcgacggcacccagctgcgcgaagtacacacagcccgcagcgtgcgcgagttggccctcgccgccatcgacgccggcgtaggcctggcgcaatacgtggacagcctgggcctggatgacagctacgactacgcaacgctgctggccgacctgaggattctgccgccgctggaccacccggacccggcccacatgctgatcagcggcactggcctgacccacctgggcagcgcctcggcacgggacaagatgcaccaggccggcgacgacacggcgctgaccgacaccatgcgcatcttccgatggggcgtggagggtggccgtccaccggctggccaggcgggcgtgcaacccgagtggttctacaagggcgacggcagcatcgtggtgcgccccggcgcagccttcccggtgccaccgtttgccgaggatgccggtgaagagccggagatcggcggcctgtatgtgatcggcccggacagcaagccctatcgcgtcggttttgcggtgggcaatgaattctccgaccacatcatggagcgcaagaactacctgtacctggcccattccaagctgcgcagttgcagctatggcccggagttgcgcgtgggcgagttgccccagcatctggcgggcaccagccgtattctgcgcaacggcgaagtgatctggcagaacgagttcctcagcggcgaggccaatatgtgccacagcctggagaaccttgagtaccaccacttcaaataccaacagttcctcaagcccggcgatgtgcacatccacttcttcggcaccgccacgctgtcattcgccgacggtatacggacccaggccggcgatgtgttcgagatcagccaggccgagttcggtgcgccgctggtcaaccgtgtcggcagcagcgctgcggcgttcgaacccggcaacgtcatcaccctttaatggagaaccccatgactcagtttctcggccacaactacatcggcggccagcgcagcgccaacggcagcgtcacgctgaaaagcgtcgacgccagcaccggcgaggccttgccccaggactttttccaggccacgccgcaggaagtcgacgccgccgccaaggctgccgcgcaggcctaccctgcgtaccgcgccttgagtgcctcgcgccgtgcacagttcctggatgcggtggccgatgagctggacgcgctggcggatgattttgtcgagctggtctgccgcgaaaccgcgctgccggccgcccgcatcaagggcgaacgcggacgtaccagcggccagatgcgcctgtttgccacagtgctgcgtcgcggtgatttctacggtgcgcgcatcgacaaggcactgcccgaccgccaaccgctgccacgcccggacctgcgtcaataccgcatcggccttgggccggtggcagtgtttggcgcgagcaacttccccctggcgttttccacggcgggcggtgatacggcggcggctttggcggccggctgcccggtggtgttcaaggcccacagcgggcatatggcgactgccgaacgcgttgccgatgcgatcatccgcgcggccgaggctaccgagatgccggccggtgtgttcaatatgatcttcggcggtggcgtgggtgaagcgctggtcaagcacccggcaatccaggcggtgggctttaccggctcactcaagggcgggcgtgccttgtgcgacatggcggcggcgcgcccgcagccgatcccggtgttcgccgagatgtcgagcatcaacccagtgatcgtattgccccaggccctgaccacgcgggccgacagcgtggcgcgcaacctgaccgcctcggtggtacaaggctgcggccaattttgcaccaaccctggcctggtgatcggtatcgcgtcgcccgcattcaccgcgttcacccagcaagtcgcgcaactgatcggcgcgcaaccggcgcagaccatgctcaacgccggcaccctgggcagctacggcaaaggcctggaaaaactcctggcgcacccgggcatccagcacctggcgggcaaccagcaggccggccatcaggcgcaaccacagctgttcaaggccgatgtgaacctgttgatcgacggtgatgaagtgctgcaggaagaagtgttcggccccaccaccgtgttcgtcgaagtcgccgaccaggcccagctcagcgccgccttgcacggcctgcacgggcaactcacggcgacgatcattggcgagccggccgacctgcaacagttcgccgaactcacgccgctgctggagcagaaggtcgggcgcatcctgctcaacggctaccccaccggtgtggaagtctgcgattcgatggtgcatggcggcccgtacccggccacctcggatgcccgtggcacctcggtcggcaccttggccatcgagcgtttcctgcgcccggtgtgcttccagaattaccctgatagcctgctgcccgacgcgttgaaaaacgccaacccgttgcgtatccagcggctggtggatggcacgccatcccgcgacccgctgtaacgcgcacctgagaacaacaacaatccaggaggcatcatgtcgtgtatcgccgttaccccgcaccgtgcgcaattgggcgagggaccgttctgggacgcgcccacccaggcgctgtactgggtgaatatcgccggcaaacaggcgctgcgcctgatgggcgggcagttgcgggtatggcagttgcccgagcatgtctcggcgttcattccgtgtgaacgcggcgatgccctggtgaccctgagcagcggcgtgtatcgcctcgacctggccaccgaggccctgaccctgctgtgcgtggctgacccgcaaccgggcaaccgtggcaacgaagcacgctgcgatgcccagggccgcctgtggctgggcaccatgcagaacaacatcggcgagcagggtgaagacctgcccatcacccggcgctccggtggcctgttccgtatcgatgccgatgcgcaggtcacgccgttgctcagcggcctgggcattcccaataccttgctgtggagtgatgacggtcggcaggtgcatttcggcgacagcctggacggcacgctgtaccgccacgctatccagccagacggccaactcgaatccgcgcaggtgtggttcggtccccacgagcgtggcgggccggacggttcggccatggatgtgcagggctatatctggaatgcccgctgggacggcagttgcctgctgcgcctcacgcccgacggcaccgtcgagcgcatcatcgaactgcccgtcagccgccccaccagttgtgtgtttggtggcccggacctgaccactctgtacatcaccagcgcggccagcccgttggatcaccccttggatggcgcggtgttggccatcgaggtcgatgtgcctggaaaaccctgtcatcgctttgccggataagtccccgtttaaaaacaacaacaaggagtcacccgtatgaatcgtcgtcgtggtttgcgttccctgtgctgcgccgctgtggcggtctcggccatgagcttgagcgggctgttgctggccgctgaagaagtgaagatcggtttcctggtcaagcaggccgaggagccgtggttccagactgaatgggccttcgccgagaaagccggcaaggaacatggcttcaccgtgatcaagatcgccgtgcccgatggcgagaagaccctttcggccatcgacagcctggccgccaacggtgccaagggctttgtgatctgcccgccggatgtgtccctcggcccggccatcgtcgccaaggccaaggccaacggtttgaaagtcattgccgtggatgaccgctttgtcgacgccaagggcaacttcatggaggacgtgccgtacctgggcatggcggcctttgaagtgggccaaaagcagggcgccgcgatggcggccgaagcgaaaaaacgcggctgggactggaaggacacctacgcggtgatcaacaccttcaacgaactcgacaccggcaagaaacgcaccgacggctcggtcaaatccctggaagaggccggcatgcccaaggaccacatcctgttcaccgccgccaagaccctcgacgtacccggcagcatggacgccaccaactcggccctggtcaagctgcccagcggcgcgaaaaacctgatcatcggcggcatgaacgacaacaccgtgctgggcggcgtacgcgccaccgaaagcgccggcttcaaggctgccaatgtgatcggtatcggcatcaatggcaccgacgccattggcgaactgaaaaagcctgaaagcggcttctttggctcgatgctgcccagcccgcatatcgagggctacaacactgcgaagatgatgttcgattgggtcactaaaggcaccgagcctgcgaaatacacggcgatggacgaagtgacgctgatcacccgcgccaatttcaaggacgaactgaccaagatcgggttgtggcaatgaccgctgccgtcctgcagtttgacggcatcggcaagacctttcctggggtcaaggcgctggatggcatcagcttcagcgcccaccctgggcaggtgcacgccctgatgggcgagaacggtgcgggcaagtcgacgctgctgaagatcctcggcggcgcctacattcccagcagcggcacgctgcggatcggcgcgcaggccatggccttccgaaatgccgccgacagcattgccagcggcgtggcggtgatccaccaggagttgcacctagtgccggaaatgacagtggccgagaacctgttcctcggccacttgccctcgtgttttggcgtggtcaaccgggggctcctgcgcaagcaggccctcgcgtgcctcaaggggctggcggatgaaatcgaccctgccgagaaactcggacgtctgtccctgggccagcgccaattggtggaaatcgccaaggcgctgtcccgtggcgcccaggtgatcgccttcgacgagcccaccagcagcctgtcggcgcgggaaatcgaccgcctgatggcgatcatcacgcgcctgcgcgatgagggcaaagtggtgctctatgtgtcgcaccgcatggaagaagtgttccgcatctgcaacgccgtcacggtgttcaaggacggtcggtatgtgcgtacgttcgaggacatgagcgctttgacccacgaccaactggtgacctgcatggtcggtcgcgacatccaggacatctacgactaccgcccgcgtgagcacggcgaagtcgcgctcaaggtcgatggcctgctcggtcccggcctgcgtgagccgatcagtttcagcgtgcgcaagggcgagatccttggcctgttcgggctggtcggggctgggcgcaccgagctgttccggctgctcagcggcctggagcgcgccagtgccggcagcctgcatttgtgcgggcaggcgctgcaactgcgctcgcccagggatgccatcgccgccggcgtgctgctgtgcccggaagaccgcaagaaagagggcatcattccgctgtccagcgtcgccgagaacatcaatatcagcgcacgcggtgcccactccaggttcggctggctgctgcgcgagggctgggaaaagggcaacgccgaccagcagatccaggccatgaaggtcaagacacccaacgccgcgcagaagatcatgtacctgtccggtggcaatcagcagaaggccattctcggtcgctggctgtcgatgccgatgaaagtgctgctgctggacgaaccgacccgtggcatcgatatcggcgccaaggccgagatctaccagatcatccataacctggcggcccagggcattgcggtgattgtggtgtccagcgacctgatggaagtgatgggcatctccgaccgcatcctggtgctgtgcgaaggcgcgatgcgcggcgaacaaacccgcgagcacgctaccgaatccaacctgctgcaactggccctgccgcgcagcgtggcgaactgagagacgactatgaccactcaacacaacgtgctgcccacggcacgcaagcccctggacctgcgggccttgctggataactgggcgatgctgctggcggcagtgagcatctttttgctgtgcgccttgctgatcgataacttcctgtcaccgctgaacatgcgtggcttgggcctggcgatttccaccgtgggcatcgcggcctgcaccatgctgttctgcctggcgtcggggcatttcgacctgtcggtgggctcggtgatcgcctgcgccggggtggtggcggcgattgtgatgcgcgacaccgacagtgtcctgctcggcattggcgccgccttgctgatgggcctgatggtggggctgatcaacggtatcgtgatcgccaagctgcgggtcaacgcgctgatcaccaccctggcgaccatgcagatcgtgcgcggcctggcgtacatcttcgccaacggcaaggcggtgggtgtgtcccaggatcagttcttcatcttcggcaacggccagttgctgggggtgccggtgccgatcctgatcacgatcctgtgcttcctgttctttggctggctgctcaactacaccacctacgggcgcaacaccatggccatcggcggcaacccggaagcggcgttgctggcgggcgtgaatgtggaccgcaccaagatcctgatctttgccatgcacggggtgatcggtgcgttggccggggtgatcctggcgtcacgcatgacctccggccagccgatgatcggccagggctttgagctgacggtgatctcggcctgtgtgctgggcggggtgtcgttgagtggtggggtggggatgatccgccatgtgattgccggggtgttgattttggcgatcatcgagaatgcgatgaacctgaagaacatcgataccttctaccagtacgtgatccgcggctcgatcctgctgctggcggtggtcatcgatcgcatgaaacaacgctgatcccaagccaaatgtagttccaaatgtgggagggggcttgcccccgatagcggtgtgtcagtgtgcatctctgtctttgacactctgctatcgggggcaagccccctcccacaagtttagtccgcggagaatttgaagacggtgttctgggtgtaggtctgccctgggttcaggcgggtcgacgcaaacttgggctggttaggcgcatccggaaaatgctgggtctccagcgtaaacccgctccagtgctgataggtcttgccagccttgcccttcaccgatccatcgaggaagttgctggtataaaactgcaccccaggctcggtggtaaacagctgcaagcgccgcccggacgcaggatcatgcacctcggccgccacctgcttcacgtcaccctgggtatccaatgcccagttgaagtcgaacccaccctgtttcggctcggcgaatttgagctgcgggtgatcgtccttgatgtgctggccgatcggcgtcggcgtgaggaagtccatcggtgtgcccttgaccggcgccagttcgccggtgggaatcagcgtcgcattcaccggcgtgtaatggctggcatgcaaggtggcgacctgcttgaggatgtcgccattgcccgcaccggccaggttgaagtagctgtggttggtgaggttgagcaccgtgggtttgtcggtggtggcgctgtagtcgatgtgcagttcgttgttgtcattgaggcggtaggtgacttcggtcttcaggttgccggggaagcccatttcaccgtccttggacaggtaggtgagggtcacgccaaccgagtccttggccttgacttgggtggctttccacacccgcttgtcgaagccctgggcgccgccgtgcagcgagttggggccgtcgttgagtggcacctggtagcgcttgccgtcgagttcgaaggcgccgccggccaggcggttgccgaaacgaccgatggttgcgccgaagaacgccgtaccgctctgatagccttgcacgtcgtcaaagcccagtaccacgtcgtcgagcttgccatttttgtccggcaccttcagcgactgcaacacgccgccgtaggtgatcaccgtggcttgcatgccatggctgttacgcaggatgtactgctcgacggcagtgccgtcattggttttaccgaacgctttgtgttcgctggtaaggcctgccgcctgggcgccgccgctggcgaccagcatggacagggcaaggcccgaaagcaggtaacgagggtgcttcatggtcgaacttccttttgttgttttgagtggaatagttctactaatgtgcgatattttgtcgatatgacagcgaatttatagccttaaaccgggtttttgcaaaataaaataagactaattaagcgaggcaaccttttatgacgacgcaacatgcggtttaccccgaccttgaaggcaagaccgtcctgatctccgggggtgcctcgggcatcggcgaattcatggtgcgcgccttcgcggcccaaggcgccaaggtcggctttgtcgaccgcgcacaaagccagggcgaacgcctggcagcgctgttgagttcacgcgggcacagcgtggaattcgtcaattgcgacatcaccgacgagattgcctataaagccgccatcactcgtttcgaacactccctggggccgatcaccgtactggtgaacaacgccgccaacgacgtgcggcataccctggaggaggtcgactcggagatgttcgaccggctgatctccgtcaacctcaagcacgccttctttgccgccaaggcggtggtgccgatgatgaagggcgcgggcggcggggcgatcatcaacctggggtcggtcggctggatgatggcttcggccggctacccggtatacgccgccagcaaggccgccgcccacggcatgacccgcgccctggcccgagaattggggccgagccgcatccgcgtgaacacgctggtgccgggttgggtgatgacggaaaaacaactggcgatgtgggtcgacgatgccgccaaggaactgatcagccgcagccaatgtttgccggggagtgtgttgccggaacacatcgccaacatggcgttgtttcttgcctcggatgcctcggcgatgtgttcggcgcagaactttattgtggatggtgggtgggtctgagtcgggctcaatccttcagtcaacactgaactgatgtgggagggggcttgcccccgatggcagtgtttcagtaacaggtgtgcagactgaggccacgctatcggcggcaattcgaatcgtcacgccgccccccacattagaactggcttgcctactcgattggataacgcttgaaagccgagtgctgttccaggcgctcggcgtggcgtttcaggttggggaacgcatcggcctcgaccaccgacgccacggtgaactggctgaacgaccaggcgactgccgctgtcagggaagcctgggtcaactcctgactgtcaggcagttgtttttccagcagcgagtaggccgccagcaactggccgctgacgcgatccagccagggcgcatgcagcttttcggccgggcgcaggttgtgttcgtaaacgatctgcacgcttttctcgcaggccgccagggccaggccaaggatatgcaggtcatgggcacgggcgtcgggggaagggggcagcagctttttgtcggccggggccagggtttccagatagtcgaggatcaggctggaatccatcagcaccgtgccgtcatccagcaccagggtcggggccttgaccaccgggttgatctgggcgaactcgctgaaggtgctgaacaccgacagtggttcatgcacaaaatccacgccgtacaggtccagggaaatggccacgcggcgtacgtagggcgagtccagcatgccgatcagtttcatgaagcctccgttgctcacaaggtgatggctccagagagtaagggcacaggatcggcatgcgcaatgactgaatgttgcctgcaaaggtcaggctgcggtcattcaggcaggacgcctgatgttctgccggctggcccccggtggctggccggtaatgcgcttgaatgcacgactgaacgccgcctgggaggtgtagcccaggcgcagcgccacttcttcgatgggtaaacgctccagggtcagccattggctggccaggcgcatgcgcagttccgtcatgtagcgcagtggcgggatacccaaggtcgcctggaagcgttcggcgaataccgagcgggaggtatgacactgcgcggccagttcggccacgctccaatcgcgcccgggttgctggtgcagcacgagcagggcgcccgccaaccgtgggtcgcgcaacgccgccaccagccccgaggcattgccgcaggcacactccacccaaccccgcacaatcatggcggccaccacatcggccaggcgcgtgaggatgccggggtagccgacgcgagccgtggcgacttcgcgttccatcaccgccaggatcggcatcaggccggggtaacgctggccctgggcatcgatcagcatcaaggccggcatcaggctgcccagcccctggagactgccgagttcgaactccatgcaggcactgaacagcaaggtacgtggcggcgagtccggtgatgcatccacagcgcagacgctatcgcccagcgacgtcgcgtcaaagcctccgatgtcctgcaccggcctgtccgcactggacagcagcgcatgggcaccgccgtgggagatgaacacggcattgcccgcggacaattcgaacaggctgtcgtcgtcggtgcgcagggtggctgtccctgcggcaaggaaatggaagtaggcatgccccggtctggcgtcaaagcccatgccgaagctcggcccggcctggatacgtcgatactgcacgccgcgcaggcgcatgccgcgcagcagttcgtcgataaggtcggaggacagggtgaacggtgccgctgcagtcatgttcggggtttcggtcaaaaactaaagtgtttgaatcatagatcatccgggttggcaaacctagactggccgtcgtgctaatgaccgaggatgtcgtgtgatgaatgattgtgtagcccaagccgctcaccctgcccaggtggcgcccgatgcgcccgcctggatggcggtgttttccctggccatgggggtgttcggcttgttgacggccgaatacctgccggccagcctgctgacgccaatggcgatggaccttggcgtgtcggaggcgctggccgggcaggccgtgactgtgacggcggtggtggcgttgttcgccgggttgctggtgccgggcctgacgcgtggaatcgaccggcgcgtggtgctgctgggtttttccctgctgatgattgcttccaacctgttggtggcgttttcttccagcctggcggtgctgctgttgatgcgcatcctgctgggggttgccctgggcggcttctggagcatggcggcggctgtcgcgatgcgcctggtgccggcggcgctgctgccccgggcgctgtcgatcatcttcagtgggattgccgtgggcacggtggttgccgtgccgctgggcagctacctcggcggcgtgtacggctggcgcagtgcatttgtggcagcggcagcggtcggcacggtgacgctggtgttccagctgttcacgctgccgcgcctggctcccacgggcagtgcacgcttgcgcacggtgctggatgtgctgctgcgtccaggcatcgccatcggcatgttgggctgcgtgctggtgcacaccgggcactttgcgttgttcacctacatccggcccttcctggaaagcaccacgggcgtgggcaccgaagggctggccttgatgctgctgggcttcggcgccgccaatttcgtcggcacgctgttggccggttggatgctggtgcgttatccgcgcggcacgctggtgctgatgccggtgttggtaggcgtcgcggcgctggccctggtgttgctgccggcctcgctgccaggccaggcgttgctgctggcgctgtggggcatggcctttggcggggtgcccgtggcgtggtcgaactgggtggcccgcgctgtaccggatcaagctgaaagtgccggcggcatggtggtggcgtccgtgcaatcggccattgcggcgggcgcggccggagggggcgcgatgttcagtctcagtggcatcagcggcgtgtttctcggcgccggtgtgttgatgctgttggctgccctgttgattgcactgcgggtaacagtgccgggcaatgacgccgtgggtgcaccgctgcatctttgacgtcagcctggagattggccgtattcacggtgtgacgagccatcgacctttggtttagtctggagcgcttcgttgaacgcaagcacatttggagcagtaagcatgaccgattacgtacccccgaaagtgtggacctgggacaccgagaatggcggcactttcgccagcatcaaccgccctgtggccggcgcgacccatgaaaaggaattgccggtgggcaagcatccactgcagttgtactccctggccacgcccaacgggcagaaggtcacgatcctgctggaagagctgttggccctggggcacagcggcgcggagtacgatgcctggctgatcaagatcggtgacggcgaccagttcggcagcggcttcgtgggggtgaaccccaactccaagatcccggcactgctggaccgcagcgacgccacgccgattcgggtgttcgagtccggagcgatcctgcagtacctggccgagaagtttggcgcgttcttccccaccgagccggcggcccgcgccgaatgcctgtcgtggttgttctggcagatgggcagcgcgccctacctaggcggtggtttcggccacttctatgcgtatgcgccgagcaagatggaatatgcgatcgaccgctttgccatggagaccaagcgtcagctcgatgtgctcgaccagcgcctggcggtgagccaatacatcgcgggtgatgaatacaccatcgccgatatcgcgatctggccctggtatggcgggttggtcaaaggccgtttgtacggcgcggcggagttcctctcggtgcatgaatacaagcacgtgctgcgctgggccgatgcgattgaagcacggccggcggtgcagcgtggacggcgggtgaatcgggtgtctggcgaggagcagttacccgaacgccatgacgcaagcgacctggactgagtgtgggagggggcttgctcccgatagcggtggatcaggcacggatgtatcgactgacccaccctcatcgggagcaagccccctcccacatttatttgtagcgctgctcgaacaccgccacctgctccggcttgatcagttcaaacggcacccacacctccggctcaatcgcctcgcccttgatcattcgcaccgccgcctgcaaggcctgtgtggcctgggccttcgggtcctggaacaccgaggccgtcagcaagccgcgcttgatcgccgccagcccgtcgggcaagccatcaatgcccacaatcgccacatcgcccttggctttgcccgcttgctgtaaagccatggccgcaccaatcgccatttcatcgttgttggccacgatggcatcgaactgcgtgcccgccagcagccagttgctggtcaggtccatgcccttgctgcgctgccattcggcgctttgctgctcgaccaccttgatcccgggaaagtccttgagcacctgtttggcgccctcggtgcggtcatgggtggcgttctgtgcgaggtcgcccatgatgatcgccacgttgcccttgccgccgagtttttccgccaggtagcgcatctgcaactgcccggcctcgatgtcgttggaggccacggtgaccacgcctttgggcagggtgcgttcgtccgggtggcggttgacgtacaccagtggcgtcttggcggtgacggcggcgcgggtcatgttggcggtggcggcggtgtccaccggcagcacgatcaccgcgtcgaccttctggttgagaaagccttcgacctgattgagctggcgcaccacgtcgccctgggcgtcttcgaactggatctgcacatcctgctgcttggcggcggcttcgaggccggtgcgcacgtaggtcatgaagttatcgtcgacccgggcgatgctcacgccaatgcgataggcggcgaaggtccattggctgaacagcagcaacagcgtggcagcaagcaatgaatagcggttcataagggggttccttttattgttatagggtgaacgcctggcggaaacgtgccagggccaactcactgtcaccgctggcccagccttccaggccgaccacgccgctgtagcccatggcatgcaaggcccgggcgatggccgggtagtggatttcgccggtgccgggctcctggcgccccggcacgtcggccacctggatttcaccgatgtgcgggccggcgcgctggatcagctcgatcaggtttccttcgccgatctgcgcgtggtacaggtccaggttcatcttcaaatgcgggctgcccacggcctcgatcaacgccagagtgtcgtcggcgcgggcgaatggcgtgccggggtgatcgacctcggtgttgaggttttccagcaggaacacacggccggcgtcttcccccaggcgggcgattttttccagggtcttgcaggcgctcagccacatgcggccggtggtctggctcacgggttggacgggcaggccgccgtcacccaggccggtaccgtgcaggttgaggctagggcaattcaactgctcggcgacccctaaggattcgcgggcgctgtcgagcaactggcggatgccgtcggggtcggtgagggtgccgctgatgtagccggtcatggacgtaaagtcggcaccggtggcggcgagggcggcgatgtccttgtgggtccagtcccagatttcaacgctgaagcccagcgcatgaatacgctgtacgcgctcgatgaagggctggtcgagaaacaccatctccgcgctgatcgcgagcttgaacgggctcatagggtcaccgccttgcccgtttcgaacgattcgatacaggcgcgggcaatcgccagcgccgcgcgtgcgtcttcaccgctggccaggggcttggcgccgctgcgcaggcaatcgacaaagtggttgagctcggcgatgtaggcgtcgcgcaacaggtcggtgtccatgcgctgggtgtcggcctggatgccttgggcgaggtagcgcaccaagtcggactcgttaaggctgcccatgctcagcatgccggcgctgccgaacacttcgccgcgcacgtcgtagccatacacggcctggaaattggcttcggcagtggcgatggcgccgttgtcgaagcggatcgcaaccacagcggtgtcgaggaagcctttgtttttgtaatcgggcgcgatcagtgcgtcagccatcacgtagacctgcaccgcctcggcgccggggttgaggtagcgcagcgtgtcgaaatcgtggatcagggtctcgaggaagatcacccattgcggcgaagcggccgggttgttcagcgccgggtcgcgggtcagcgagcgcagcagctgcggggtgccgatgcggccggcggcgacgtcgaggtgcgcggtgcgaaagctcttggcgaaacgccggttgaaaccgacctgcagcggcacccgcgcatcggccgcggccgcgatggcacggtcggcctcatccagggtgatggccatgggtttttcgcagaagatccctttgcccgcgcgggccgcgctgatcaccagctcggcgtggctgcgggcgggggcggcgatgagtacgccgtcgatgtccgggtcgtcgagcaattgttgagggtcggtgtaaaccttgctcacgcccagttcagcggcgaggcgggcggcctggcctggcgtcgggtcggcaatcgccgccaggctggcgccggggatatgccgagcggcggtcaggccgtggaagctgcccatgcgaccggcaccgatcaaacccaggcagatgtgctgtgtactcatgaaataaccccttgttgttattggccccaggacggtcctggtgggcgaaggggtaggagcaaggcttgtgccaattcataacacattgataaatagcgatttattattattcataagcaaatagtgttcatttaatgaacatgtctatactgacatgtcaaaaacatggacatggataccgccccaatgagcatggcgttcagcgtgcaagacctcgactacctcgcagcccttgggcctgctgcgctgaatgatggcccagtggccgcgctggagcaggcctggcgtgactgcctggccggtcaggtcgagcgcccggcgcacgtgcgccaagtgatctgggattcgtggcggcgcagcgtcgaggccggtatcgacccggcagacaaggcgtaccgcttcgtggccgccgaaaccctggccgccacccagaccacccaccgcgtgctgatcgccgccgccgcgcaagtcatgcgaggtttgctggcctacaacccgcgaggccatatcaaccttaccgatgccgacggcaccaccctgtatttctgcgggctggacatcacccccgtgggcagtcgtctgctggaatcggtacaaggcaccaactgcaccggcctggcgctggccgaagatcgcttggtgtacgtgctggccgaggaaaacttcggtatcggcctgcgccagcgccgcatgcactgcgccgctgcgccgatcaagaatgctcaaggccagaccctggccatgctgaccctcaccgccgagcccggctggtttcacttccataccctcggcacggtgcaggcggccgccgaggcagtgtcgcggcagatggcgttgcaggcgttgctggaagagcagcaaaccgtgctcgaagtcctcaacgaaggcctggtggtgctggacgagcgcggctgcatcaaggcgctcaaccgttatgcccggcagttgttcggcgtagggctggagttgatcgggcggccgttccagcaactgggccgtagcgagttgagcgatgccctgggtgaacccgtgcgcgacctcgattgcaccttccacctgaacaatcgcagccaactcgcctgcctggtttcggtgtgcccgctggagcagggcggggtgatcgtgtcgctgcgcgaaaaccgccgcattcgcgaaatcacccggcgtcttatcggcacccaggccagctatacatttgaaaccatccagggcaactcccgcgccatccacgacgccctgcacctgggacgtatcgccagtcgcagcgattccaccaccctgatcctcggcgaaagcggcaccggcaaagagctgttcgcccaggccatccacaacggcagcgaccgccacaaaggccccttcgtagcggtcaactgcggggcgatcccgcgtgacctggtgcaaagcgagctgttcggccatgtcgaaggcgcgttcaccggcgccacccgtggcggctcggcgggcaagttcgaactggcggacggcggcaccatcttcctcgatgagatcggcgacatgtccttcgatgcccaggtcagcctgttgcgggtgttgcaggagggggaaattacccgcgtcggtgcgaaaaactcacggcaagtggacgtgcgcatcatcgccgccacccaccgcaacctgagtcaggcggttgcggagggcgcgtttcgcgaggacctttactaccggctcaatgtattgaacctgaccgtgccgcccctgcgcatgcgccgtgaagacattccgttgctggcgcggcacttcctggcgcgctgtgcacgttcgttgcgtaaatcggtgcagggcttttcgccggaggcgatggcattgctgtcggcctatggctggccgggcaatgtgcgggagttggaaaacagtattgagcgggcgaccaacctggcgatgggcgagctgattcagcctgccgatctgccgatggaaaccaagcagcacaccccgctgcgcgcctatgagccgcaacccgcccaggacctgagtagccacgaaatgcacgccatcgtcgccgcactccaaaataccggcggcaacatccgcctggccgcccggcaactgaatgtgtcgcggggcgggctgtacaacaagatgagccggtttggcttgagtgccagcgatttccgccgcgcctgagattcaagcagcgctgacccctgtggcgagcgggcttgccccgcgttgggnnnnnnnnnnnnnnnnnnnnnnnnnnnnnnnnnnnnnnnnnnnnnnnnnnnnnnnnnnnnnnnnnnnnnnnnnnnnnncccaacgcggggcaagcccgctcgccacagacagccagcgcctgagtgccgttagaggttctccgacgtcacaatctgcggcggtatatacacccgctgccgcaccggatcgaaccgctcggcactctgcaactccaccatcaactgcaccagcgccgtcgccgtctggcccggttgcgagtccatcaccacatcgatcaagccctggcgcagcgcctggcgcgacagctcggtggactcctgcaggatgcaacacagcgctggccgcttgggcaactgcgccagggcgctgatgatgccgtcgccgccgccgcccaccacgcacaggccgcgcaggtcgctgtggcggctgatcaggtcgagggtggcttcttcggtgatgtcgcagttgtccaggttgatcaaaggctccagcggcttgagccccggcgcgtgctcggccaggtagctgtgcaggccttcgacccgtgcctggtggccgagaaaacgatggccgccgagcaggatgcccacgctgcctttgcgcgcgccgcaggtgcgggcgagcaaccagcccatggtgcggccgaccacatgattgtcctggcccacgtagggttcatcggcctgttcgtggatatccgagagcagggcgaccaccggcacgccggctgcgcggatctgcgccaggcacgcgttgatcagcgggtgcgcgaagctgaccaccgccaggccatcgcactgcacggccaattgttcgatctgcgcgacgatggcgctgggcgagcgatccacgatgtactcgaactggcacgtcaggttggcgttggcatgctgttcggcagccgtgctgattgcctgcgccaggctggcatagaacgcctgggcggtggccagcaacaggatgccgaagcgataggtcggccgacgttcgcgaatgcgctggccgatcagccgcgccgcgaaataccccaccgcttcggccgcctggaacacctgctcggcggtctcgggattgaccggtgcccgtgcattcagcacgcggtcgacggtggccacactcagcccggcctgggcggccacgctggcgatggttgggcgtttgtggttgttcatgactggccccttgagcgtcttgatagaaaactatcaagccccgctgggcctggatgatagcttgatagggaatggattcaaggccttgagggtgaataaccggttctctaaggtgggtttcacacagcaccagaaaccacccgcttgcggagaacaataacaatgcctggacacaccgctcctctcacccgtcgcgactacagcctcaccggccccgaagccgcccgcgccgctgaaaaaggcctggtctcggccaactggtaccagtcgcccatctcgcgtaaacgcatgaaagaactgatgcaacgccgtgacggcccggcactgctcgacacggcgatctgggtgatcgcactgtttgccagcggttttggtggctactggttctggggcacctgggcctgcgtgccgttcttcctcgtctatggcgtgctgtatggcaccgcgtccaacccgcgctggcatgaaaccggccacggcaccgccttcaagacccgctggatgaacgacgtgctgtaccaggtcgccagcttcatgtgcatcttcgaaccccacgtgtggcgctggagccatgcccggcaccataccgacaccatcgtggtcggccgcgacccggagatcgtcgagccgcgtccaccgagcttcctgatgatgggcctgagcctgttcaacctgcccctggcctggaagaccttcagcggcgtggcgcgccacgccatcggcaagatgagtgcccaggaagcggacttcatccccgaatccgaatggcccaaggtgttccgtgccgcgcgcatctgggttggaatttatgccgtggtgatcggcaccgccttgtacctgcacagctggctgccgctgatgctggtgggcttgccgagtatttatggcgcctggctcggctatctgttcggcctcacccagcatgttggcctggctgaagacgtactcgaccaccgcagcaattgccgcaccatctacatgaaccgcgtgctgcgctttatctacatggacatgaactaccacctcgaacaccacatgtacccgatggtgccgtaccacgccctcgcgcaattgcacgaagaaatccgcagcgactgcccgccgccctacgccaacctgttcgaggcgtacaaggagatcctgccgaccatctggaagcagcgcagcgaccccacctatttcgtccagcgtccgattcacccgaacacgcatccggccgcccatgcgccggtgcatgcagaaaccgctgccggctgacccccctccaagcacaagagaaaacgccatgaacgatcaatggatcgacgtctgcgccgtgggcgaaatagacgaagaagacgtgctgcgcttcgatcacgggccgcacacttacgcggtgtatcgctcggccgagaatgaatttttcgccaccgccggcctgtgcacccacgagaaaatccacctggccgacggcctggtgatggaccacgtgatcgagtgccccaagcacaacgggcgcttcgattaccgcaccggcaaggccctcggcgcgccggtgtgcgtcaacctcaagacctacccggtgcgggtcgaagcggggcgggtgttgctcgccgtcacggcttgatcatgaacgatcccttgatcatcgtcggcgccggccatgccggtggccgtgcggcgctgaccttgcgtgaagaaggctacaccgggcggctgatcctgattggcgatgagccgcacttgccctacgagcggccgccgctgtccaaaggcgtgttgcagggcacgacggacctggccggctgcagcctgtgcgacagcgtccggctggccgagttgggcattgagcatatcgccgctaacccggtgacgcagttgcagccgcaacagcatcgcctgcaactggccgatggccaatggctgcggtacgccggactgctgctggccaccggggggcgggcgcgccgcttgcctcaggagcaggccaacctgctctacctgcgtacccacgatgaagcgctggccctgcgcgctgcgctgaaggccgggacgcggctggtggtggtcggcggcggattcatcggcctggaagtggcggcgacggcacgtggcctgggctgtgaggtaaccctgcttgaagccgggccgcgattggcgggccgggtgttgccgccggttatctctgaggcgctgctggccttgcatcgccagcacggcgtcgacgttcgcctgaaggtggccttggagtcgatccaggccgacgccgtgctgctggtggacgggcagcgcttaccctgcgacctggtagtggtcggcatcggcatgcaacccaatatcgaattggccacggcggcggggttggacgtggggcagggcattcgcgtggatacgcacctgcgcaccagcgcgccggatatttttgccgccggtgacgtgtgtgagtttcgcctggatggcctgtatcaacgccaggaaacctggcgcaacgccgaggcccaggggaggcatgcggcgctgaacctgctgggccgcgatgtgccgttcgaggcgctccccggattctggtccgaccagtacgactggggcttgcagaccgtcggcgtgatcacgcccttgacggtcagccggccattggcgggcggtggcttgctgctgttttacctggacgccaatcaccgcttgcaaggtgcctgcggatgggcgcccggcaacagcgtggccaaggacatcaaactctgcgagcgcctgatcaacgcgcgactcccactcgatcccgtcagcctggccgaccccgagctgtccctcaaacacctgctgcgaggctgatatgcgccaattcctggtgttccaatccctgtgggccatgcagaccgaacccggcccactcgaggctcaactcgagcgcatcaaggccgccggtttcgacggcattaccgaccatttctacgaacccgccgatgtcgcccgcctgcacgccgctgccacagcgcagggcttgcagatcgaaggccagttgttcccgcaatcggtggatgacctggccgccgcactggatgtgatcagcgcctacggctgccaccacctcaccctgcaagccgatgtgcgcccacgcacccaggccgaggcggcccgactggtggaaggctggcagcgcttggccgagcaggtggattttccggtgctgctggaaacccaccgttatcgcctcaccaacgacctgctgttcacccttgacctgctggcacagatgccggatttgaagctgctggccgacctgtcccactacgtggtcgggcgtgaactgccggagcctggcgccgccgaggacgatgcgcagatacgccgcatcctgcgcaacagctggggtttccatggtcgcgtggccagtagcgagcaggtgcaggtgtcgttggacttcccccagcaccaagcctgggtgcagcggtttaccgagtggtggcgctacgggatcgaagactggctggcccgcccgcagacgccgcagagcctgtcctttacctgcgaactcggcccgccgccctatgcgatcaccggtgcggacggccgcgagatcagcgatcgctgggccgaagcgctgaagatgcaggggctgatgcgtgaggtgtggcgcagttgtcagaaatgatctgctaatctgcgcgggttcaatctcgccctttagcctggactttcaccatgaccccatcctccgttcagccgcccctggaaccgcagtccgtgtgccacccgatcaccagcagcgcgattttcatggtcgccactgtcacccccggcagcgaggacagggtacgcgcctggtgcgccgatatcgccgggctggtgcgctcggtgggcaagcgcgtgccggcgggcaacctgacctgcgtctgcgggtttggctcgaatgcctgggaccgcctgttcggcgcgccacgcccggcggcgttgcacccgttccgtgagttcggcgtggcagggcgcatggccgtgtcgacaccgggggatatcctcctgcatatccgcgccgaacagatggacctgtgcttcgaactggccacccacatcatggcggccctgggcgacagcgtgaaggtggtggatgaggtccagggtttccgctatttcgacatgcgcagcatcatcggctttgtcgacggcaccgagaacccggtagggcgcaaggccgagggtttcaccatcgtcggcgatgaagacaacgagtttcgcggcggcagctacgtgctggtgcagaagtacctgcacaacatgaccgcctggaacggtttgacggtggaggcccaggagaaagtgatcgggcgcaccaaattgtcggatatcgagctggatgaagaagccaagccaagcaactcccacagcgcattgaccgtcatcaccgacgagaacggcgaagaagtgaagatcctgcgcgacaacatgccctttggccgacccggagccggggagtttggcacctacttcatcggttatgcgcgttcgccgcagcccctggaattgatgctggagaacatgttcgtcggccgcccggtcggcaattatgaccgtctgctggatttcagcacggcagtcaccggcggcctgtttttcgtgccctcggctgacctgctggaagaattggccgaccgaaccggcagtctgtaaggcaacacagtacaaatgtgggagggggcttgcccccgatagctgtgtgtcagtcaacttatatgcagctgacactgcgcaatcgggggcaagccccctcccacattggattattggtggtttgagatttgtgttgggtcagctcaacagcccagtgctgaccgccacaatcaggaacacccccagcagcgcacggtagatcacgaacggccaggtggagaaccgctccaggaacttcatcaggccccagatcgcaaagaacgccgagacgctcgccaccaccagaccgaacagcaagtgcggccaggcatgcgccggcatgtcggcgtgcagcaacacccacaactccttcagcccggcgagggcgatggccggcaagcccagcaggaaggagaagcgcgccgcttcctcacgcttgaaattgaggaacagggcagcggtcaacgtggagccggagcgcgatacccccggaatcaacgcaccaatctgcgcaatcccgacgatcaacgcatcgcgcaggcgcatttcgctcacttcacgggtgtggcgtgcgcgaacctccgccaccgccagcagcaccgccatgactacgcaggaaatgccgatcaccatcagcccgcgcagcggcgagttgcatgcgttcaaggtcgaggacagcgccaggccggcaatcccgatggggatggtcgccagcacgatcgccaccgcgagtttgaaccagcggtcgttgtagtcaccccgacgtaccgcgccgatgctgccggtggtgacctggcgcacatcgcgccagaagtaactgaccaccgccgccagcgccgccagttgcatggccgcggaaaacgccgagccggggtcttgccagccgagcagggcgggcaccacgcgcatgtgggcggtggacgacaccggcagcagttcggtaatgccctggatcacgcccaggatgaagatctgcaggtaatccagggaggcaaaacccacatccaggccggcggtacacatgttggtcaaaataggtgtccttgaagagcagaggcaaatttcacgaagtttattcgaaatgtttcaaggtttcggcagaggcaacacctatttgcaatcggttcagcaagtagaaaggttggcctctgcccgtgttttgtgaacaatggcgccctgcgttttttcaccgagagccccatgcctgaaaccaccgtcgaattgatccagaccggccccgaagaagccgagctgatccgtaatctctaccagtactacgcctatgaatcgtccgattgggaacaggaagatgtggaggccgatggccgtttctatatccatgacgaacacctggcccgctactggcaagacccgcaatggagcgccaacctgctgctggtggatggctacatcgccggcttcctgctgatcgaaggcagcgaactgccaggcatcgacgccctggaactggccgacctgttcatcctcaagcgctaccgccgcaaaggcattggtcgcgccattgccagccaggtgctatgcagcggccaggccaattggctggtgcggttctatgaccaggacgaagtgtcccaggcgttctggcgcaccgtgctggataacctgccgcgcccggtgcagacgatagagctggaggatgacccgcagttggtcagttacctgatcacgcgggcggcgttgcattaaaagcctgctgcatcacctgcggcggctggccgaacgcccttaaaaacgcctggcgcatacgctcgcgatcaccaaagccggtttcgcgggccaccacctcgaccgggtgacggctggtctccatcagcgcccgggcggcttccacacgcagggcttcgatggctttggccggtgtctgcccggtttcctcgcggaatacccggctgaactggcgtgggctcagccgggccacatcggcgagggcttctaccgagaggtcgtgggtcaggttctcacgggcgtaggccagggccagttgcacgcggtctgacttggggtccagctccaacagcgccgacagttgcgattgctcactgccgcgacgctgggcaatcaccagtttgcgcgcaatgcgccgggcgaggtcgctgcccaggtcgttctccaccatggccaacgccaggtccacgccggcgctcatgccggcaccggtccacacctggccgtcgacgataaacagcttgtcttcttccaggcgaatgtccgggtagcgcttgcgaaaggccggtgcgtgaatccagtgggtggtggtgcgcttgccttcgagcagaccggcttcggccagcacgaagatgcccatgcacagcgaggccacgcgccgcgactgggcggaggcggccttgaccaattccagcaggttggcttccggcaggcggaattccaggtagccgctgacgatcagcgtgtcgtagccctgcggccggatcggcgtggtgttcacggaaaagccctgggacgtcatcaccgcgccgccactctccgacaccaggtggaactcataggctggctcgccgcgcagcaggttcgcgcactcgaacaccgaacccaggctgaggctcagggattggaagttcgggtaaaccatcagcgcaacgctgtgcatcgtcattctccaaggggcgcgggagaggggattgtcggcgcgtgccgggtaaacggcaactgccttcgcggcatgtccggaatccttgcggatctgacattgtgcgcgatagccccgactcctaacattccctcaacgaactagacgactggtctaatcggacgggatcaagcatgagcagcgaaaccaaaagtgcaagacagaccattctggacaccgcgcaacgtattgtcggtcgcaaaggattttctgcggtgggcctgaacgaaatactgcaagccgccgaagtccccaaaggttcgttttatcactacttcaactctaaagatgcgtttggcgttgtattgcttgaccactacttcgaccactacgtgcagggcatgcagcagttgtttgaacagccgggcatgagccagcacgccaagctgatgcgttattggcacagttggatcaacaaccagaccggctgcaccgacgcgggcaaatgccttgccgtcaaactcggtgccgaggtgtcagacctttcagagccgatgcgcctggccctgcaacgcggcaccgcacgcaccatcgggctgctcgccgaggccttgcagcagggtgtcgaagacggctcggtaacgcttacgcaacaccccgaaagcctggcccagcgcctgtatgcgttgtggctggggaccagcgtcatgagcaagatcacccgtacagcggcgccgttcgaccaggcgctggggttgacccgacagttgttggggcatccgcacgacactgacactcacacctatcgaggcactggaaaatgaaagtattaatggtactgacctctcacgaccagctcggcgataccgggcgcaagaccggcttctggctcgaagaatttgccgcaccctattacgcgttcaaggacgccggcgccgacgtggtgctggtttccccggccggtggccagccgccgctggacccggtcagcgacctgccggacttccagaccgaacagacccaccgcttcgctgccgacccagccgcgcaacaggccctggcgaccacgctgaagctggattcggtcaacgccgatgacttcgacacggtgttctacccaggcggccacggcccgctgtgggacctggcagagtcgccggtatcgatcgcgttgatcgagtccttcgagcgtgccggcaagccgatcggctttgtctgccatgcaccgggtgccttgcgtcacgtcaaggcagtcaacggtgagccgctggtcaagggccgtcgagtcaccggtttctccaactcggaagaggccgccgtggaactgaccgatgtggtgccgttcctggtggaagacgagttcaagaagttgggtggcctgtatgagaaaggcgctgactggcagtcctttgtcattaccgatggcttgctcgtcaccgggcaaaaccccggcagttccagcgatgtcgccaaggccctgctgaaactcaccgcttaactcaataaaccgctgcaagcattggcgacttgtaaaagtcgccaatgctttagcgcgcccgctatttggaaattattcaatgaatcactctattttaagtaccccggtaaacctggggcaccacacgctgaacaaccgtattgtgctgccaccgttgacgcgccagcgcagcgcccagccgggcgatatcgccactgacttgatggccgagtattaccgccagcgcgccagtgccggcttcatggtcagtgagggtacgcagattgaaccgcgtggccagggttacgcgtggacgccgggtatttatacgccggcgcagatcgacggctggcgcaaggtcaccgaggcggtgcatgccgaaggcggggtgatctttgcccagttgtggcatgtcggtcgggtgtcccataacgccttgcaaccggacggcgccgcaccagtggcaccgtctgcgctccaggcattgcaggccaaggccttcatcgaaaccgcgccgggcgagggtgagttgaagcaaccgccggtgccgcgagcgttgaccaccctggagatcgaggagctggtcgggcactacgcccaggcggcgcgcaatgcattggatgccgggttcgacggggtggagatccactcggcgaatggttacctggtcaaccagttcatctccgcccattccaaccagcgtgaggatgaatacggtggctcgctgcacaaccgcctgcgcttcctgcgcgagatcgtcgaagcggtgaccgccgtggtcgggccagagcgcctgggtgtgcgtttctcgccgctgttcagcggcaccgaccaggaccgggtgtacatcggcctggtggaagatgacccgcaccacacctatatcgaagcgatcaaggtgctggaggcgtcgggcatagcctatgtgtcgattgccgaagccgattgggataacgccccggtattgcccgaatcgttccgccgagcggtacgcgacaccttcagcgggcggatcatctatgccggtcgctacaccgctgagcgcggtgctgatctggttgaagcagggctggcggatttgatcgcgttcggccggccgtttatcgccaatccggacttgccgcagcggattttcaacgactggccgttgaacccgctgcgggcggaagggatgtatgggggcggcgaagcgggttacgtcgactatccggtgttcgccgggtaatcaaaccacccgcaacacaatcttgccaatgtgatcgccaccttccatccgcgcatgcgcctgatcggcctgggtgtaatcgaacacctggtcaatcatcggcaggcagcgcccggctgacagcaccggccatacatgctcgcgcagttgctcggcgatggcggctttctcgtccttggtgcgggcacgcagcaacgagccggtgacgatggcgcgtttgccgaggatggtcagcaggtccacgtcattggccttggcgccgccgaggaagcccagcatcaccaggcgtccgtccatggccagcgccttgaggttattgttgaggtaggaggcgcccatgatgtcgaggatcacatcgacgccttgatctccgatcacctcggcaaaatcctgctcgcgataattgatcgcttcagcgcccaaggcacggatggccgcacatttctcttcgctgccggcggtggcgaatgcctggataccgaactcgcggcacagcatcagcgcggtggtgccgatcccgctggtgccgccatggatcagcacgcgctggcccttgtgcgcgccgccgatgccgaacaggttggcccacacggtaaaaaaggtttccgggatagcggcggcctgaatccactccatgccttcgggaaccggcaacgcctggctggcgggcaccgcgcagtattgggcgtagccgccgccgttggtcagggcgcataccctgtcgccgattgcgtattcgctgacccctgcgcccagcgcgaccacctcgccggccacttccaggccggggatcgggctgaagccgggtttcatcgggtacttgccggcacgttgcaaggcgtcggggcggttgaccccggcggcgtgcacgcggatcaggatttcgccgggggccggggagggcaccggttcctggcgcggcttgagcacctcggggccgccgggcgtggtgatttcaatcagggtcatgtcggtaggcagggtcattgggcgaatcctgagtattttcgatggctgtgagcataaccgagattggtgatgcaataatgctgcgaatcagcatgataagagtgcatatatgcagcagtggaggaggcaatgaactgggacgacgcacgggtattcctggcagtgtgccgcgaaaacacattgcgcggcgccgcacgggtgctgggcgtcgaccaggccacggtggggcgccgggtcaacgccttggaaaagtccttgaacgccaccttgttcctgcgcacctccgagggctacgcgctcactgcggtcggcgaagcagcgttgctttcggtggagaaaatggagcgctcggccctcgacctggagcgccagatccagggcctggatgaccgcctgaccggcaccgtgcgggtcagtactaccgattccctggccatcgatttcctgatcccggccatcgcgcgcctgcacgaccaacaccccgatgtgcgcgtgcaactggacgcgtccacccagatcctcagcctggccaagcgcgaggccgatatcgccgtgcgcaaccagcgcccggataaccccgacctgatcgcccggcgcattgcgcgctggccgctcgggttgtttgcgtcccagggctacctcgaccgccacggcgcacctgagccgggcagcctgttcgaaggccatgacctggtggtgtaccaacctcacctgcaaagtcagaaggacatgaccctggtctccgaacccttgggccgtggacgcattgtcgcggccttgagttccagcctgctggtgcgccgctccattgctgccggcatcggcatcggtgaaatcccggtgtgcaccggtgagcgcgacgggttggtgcgcctatggccggagcgcacgcggccactgccgtacgacgtgtggctggtgacccacgccgatctgcgccacaccgcacgggtgcgggcggtgatcgaggagattgtcgcggcgtttgccggcacgggggagtgaggtcagcacaggcttgcaagcgcttaggtggttcggtcgacacaatcgatgtttgtggcaatcaaccgagagcacgtatgaacgaatcgacgcgtcaggacctgggattattgtttctgcggatcagcggggcgctgttcctgctgtgggtgcatggcttgcccaagttgctcaactacagcgagcaattgaagctgatcgaagacccgtttcacctgggggcgaacatcacgttgttgctggcgattttcgctgaagtgctgtgcccgctgctgatcattgccggggtgctggtgcgcctggcgtgcctgccgatcctggcggtgctgttgatcgccctgttggtggtacacccggagtggacgctgttcgaagggcagttcggctggctgctgttgatcatcttcaccaccttgctgatcagcgggcctggtcgcctggtcctgagccaacgtttctcctgagcaaaaaaaggccgggcaagcccggccaaaataaggagagggtggttcaggcgtttcagcgttgcaggaacgccagcaggtcttcattcaactgctgcgcatgggtcacggcgaacccatgtggcgcgtccttgtagactttcagttctgcgcccttgatcgaagcggccgccactttaccggtggtttcgaacggtacgatctggtcgccatcgccgtggatcaccagggtcggtacgtcgatcctggtcatgtccgggcggaagtcggtttcggagaacgcggtgacgcaatccaccgttgacttgagggatgccagcatcgccacttgcagggtctgggtcagcacaccgtcagagaccttctggccctggttgaggccgaagaacggtgtgttgaagtcgctgatgaactgcgcacggtccttcaacaggccggccttgatgccatcgaacacttcagtcggcacgccttgtgggtagtccggtttctggccgaacaacggtgtgactgcacccagcagcaccaggccggccacgcgcgcgctgccgtggcgtgcaatgtagcgagccacgtcgccaccgcccatggagaagcccaccagggtcacgtccttgaggtccaggtgttcgatcaactgggcgatatcgtcggcgaaggtgttgtagtcgttgccggtccacggctggtccgagcggccgaacccacggcggtcaaaggcgatggtgcgaaaaccacggctgctcaggtattccatctggtattcccacatgtcggcgtccagcggccagccgtggctgaacagcacgggtttaccgctgccccagtctttgaaatagatctgggtaccgtctttggcgacgaatgtgctcatggaaaactccttgggtcgagggaaaaggctcggcatcactattggtgtaaagcgtacgtcgagcttgtacgggtgtgcttggttggggttaccagctgaatttcagctcgacccccaggtaattgctgtcgtcgcccccggcatcgcgcagggtctgccccacgtcgtagtgcacggcctcgacggcgccggtgaggttggggctgaacacatagtcggtgcgcacttgcgcataggcaccggtccagcgatcgccctggcctgcggtgccggccaccggcaggttgggctgggtgtagaccgcatcgctggtggtttggcgccacagcaggccgatggcggtttgcacgctgagcttgtcgatcggcttgagcgtgatcgacggcttgacgtgaatcaggttgctgtagccggtgtagcccgccagggaaaagtagtagccgttggggaacagcgggttgaaggtgccgacggtgccatccccggttttgcggtcgcccgaggcgatgtccagttgcaggccgatgcgcggcttccaggccacgctgtcgaaggtgtagccggtacggctgccaccggcccaggcgcgaatgtccttgttgccgaccgagccgctttgcagcatcgcttcgatgtcccagtcaaagcccatggccgagccgccaaggcgtgcgtcgaacagatggcgggtctcgtcgccgtcggcgtccaggtaatgggcggcggtgcgctcatacacgccgtagtaggcggacaactcgttcttgccacccaccagtcgctccacgcggaccatgtggaagcgcgcatcgctgttggatttgtcgtcgaagtgacgcccgtcctgatactgcaccggctggctggcgatcccgataaaacgccagttggaggtctcccaatcgacccacagcgcatcgaaggactgccgcacattcgggccgtcccgcgatgagatgaagcgctgcaggtcgaaggcgaaatcctggcgcccggcacgcgccttgagggtgccgctgctgaaggtattcacatactcggcgaaggccaggcgcagatcgacgcggttctggtcggcgccgccgatcgtcgtcttgtcgtacgcccgcacatcttccaattgggtgaacacccgccagtgctcgttcagatgcaggtcggcgtggacctggaagcgttggatcaagtagcgatcacgcttcatatcccgcacgccgaagccactggcatcgttcatctcgaaacgctcgcgcaacgtcgcgcccagggacaggtaggtgtaggggtttgcgctggacagcgggatgtacttcaagctgtccagcggctgcgtgcgcagcgccgggtcccgcagcaccgaccagtcttcctgccagcggttggccttgatggccgggcgtgtcgcttgctcgtcggcgtggacgctgccgacgagcagcggccacagcacggccaggccccagcctgtgcgacgcgtcattttgcggcgttgagttgatggatctccgcgacgtagccgcccggaaactccaccaacgcactgcgacggcctttgctgtcgaacgcaggcaccaagactttggcgccggagccggtggccttgcccagggtggccgtcaggtcagccacttgatagccggtggtctcgtggccgaacgggtagggcagttggccgttggtgaccagcaccgccatgcgcccgaacggcgattcgatgtcgacgcgacggtagttaccgttggcttggccgatatctgcacctggggcgtgtttgtcatccgccaggactttgccgtgggcgaagccgataaacgctttgataaaggtgtcggcacggtcggcactgaggtacacgcggttttccggcacggtctggaacgcggcgtaatccggggtcttggtgtgccagtaaagctgcatgttcacgccgcctggccactgcaccacggcgtcacgcccgatcgggtcgggaaagttgctgacgatcaccgccgcgccgttctcccgggcggccttgagggcgaggtccatgtccttgaccagatagccgttgcgctcctggccgaacgggtgcgggatcggcgtggtgaaaccgaacagcgataccgtgccggcgggggtctgtagcagttgcgaagtggtgctgctgggcaccggcagcacgttcaccaccacctggggcgtgcttttaccgccgaaggtggccaggaaactctgggcaaagcggtcgacatcggccggagcgacgtagacgtggctggtgtcgtattgcggggccacggcgaccgcaggcgttgcggcgaaggcgctgttcatcattgccccggccagcaaggtgactgccagcgataccgtcctgacttttctacacatacccactctcccgcgttttgagaaagtctcgatcttaggggcggggcagaccggcggattgtacggacgtgctcggttgaacgattcagcgtctatgctggtcatcgtagaacggtgtcatccaggaggctcaggacatgctcgacttctgcgccaggcacgggattgtctcggacatcgagatgatcgatatccagggcatcaacgaggcgtatgaacggaggctcaagggcgatgtgaagtatcggttcgtgatcgatatggacagcttgaaaaaggaaagcccggcggcttgaaatgcattctccaaaccgctgtagaacacctgtgggagggggcttgcccccgatagcagtcgggcagtcaccgcatcattgactgacccgccgctatcgggggcgagccccctcccacattggtttgcggtgtgtctagaccgagaggtgttcgtacagaattgtcgctcccaccagcatcagcaccacaccaccgaccatctccgcacgcttgcccaccaccgttcccagtactcggccaagcatcatcccgatcgtcaccatggtcatggtcgccaggccgatcgccgccgccgccaccaggatgtttacgtctacgaacgccaggcccacgcccaccgccagcgcatcgatgctggtggcgaaggctgtgacggcgaggatcatgaatgagtgctgggtcggcttctcggcctcttcatcatcggctttgagcccgttccagatcatgtgcagccccagcccgaccaacagcgtaaacgcgatccagtggtcccagtcttccacccagcgcgtggcggcgtggccgatggcccagccgatcatcggcgtgatggcttcgatcacaccaaagatcaggccggcgcgcagggcttcggtgagtcgcggtttgtgcaggctggagcctttgccgatggcggccgcaaaggcgtccgtggacatggccagggcgagaagaatcagggaaatggggttcacggtaaggcttccagtcgggctatgggacacaacgacactcccacgcgcccgacttgaggcatggaggtgtcgctggtctcaccaaccgaaaagacggtgttcgcaccacggcaggttgccgaatatgttgatacgaacgcttccaacagggtcagaagccggttactccccaacgaggtggacgatgttaggcgactgggtatgaaaattccgtcaaaaggcctgtggcaagccctctcgccacaggggacttatcgcccgttttgaaaggactggccctcaaggccgctgcggcttcaccgacgtgccgaaggtattgcccatgcgcacgctggtcgccgccggggtggataggcccaccgcgttcggcgggcgtttttcgatggggaggttctgcgcctcgcggttctttttggccgccttggttgcgttcgtgtcgttgcccatctgctggctcaggcagccatagtcgggggccttgtagccgtccacgctgacctcggcgcacttgccggcggcgttttcggcatgggccagcaagggcagggcagcgcacagcaacaggctggcaagggtcggcaaggttttcatcgggcctcctggcgggcccgaaggagtgggccggtaaggcttggaagtctagtgcagcgggcctctcatcaccgtgatgttttttttgctatcaccgtaacatcaggttcataaactggcctcaggatgacggttttctagggcgcgtcggccgtgcagcgatgcagaacagggggtgaacacggagcctggaggcgcttgatgtgcgccctggtcttgctgttgctgctggccggtggtcgcgcggcgcaggcagagtcaccgctgctgccgttgaacctgccggcgcaggacctggaacatgcactgcaagcctacagccgtgccaccgggatggcggtgctggtggaccgtgaattgacgcgcgggcggcgctccatcgcagtgcgcgggcgcttcacggcgcaagaagcactggcgatattgctgacagggagtggcctgatggcccgttatgcacgcagcgatgcgtttaccttgcagaccccgcaagttagcccaccgcccacgacccggggggcggcggcacgcaacgcggcgcggatcaacaacagttatgcgacggcgttgcagcaagccatcgagaccagcctgtgccgctcgccgctgacccggcccggcagttttcgcgcgctggtgcaggtgtgggtcaacccggatgggctgatcgaacacagccggttggtgagttccaccggcgacgaacaacgcgatgaagcactggtgcgcagcctggcagcggcacgggttgaacgcccggcgccgagctcgctgcgccaaccggtgactttacttttgatgcctgacacaacaggaacgcgcatggaatgcacagccgcaaaaggagcctcggagggatgaaaaataccgggcacagtacgatggtcagcctgttcctggcctcttacgaagacttcaaggtgcggttgcgcaagcgcctgggctcggaggacctggccaacgacgtgctgcacgagacctacctgcgggtcgaccgcatggacgtgccgccgaacctgcaacagcccaatgcctacctgtaccgcatggccctgaacatcgccgccgaccgccgccaggccgacgcgcgcctgctcaccggcagcgaggtggaagagctgctgcaaagcgccgacgaagcccaggacccctcgcgggtagtgggcggccagaaagaaatccaatccctggtcaaggcgctctacgaattgcccgcgcgccggcgcaagatcctcatcgccgcgcgcctggaagaggcgccgcacctggaaatctcccagcgtttcggtatttccacgcgcatggtcgaaaaggaaatcaaggccgccctgggccactgtgccaagcgcctggaaagaaaagtgattcagcggttcggtcccggggccggaaaaccgtcttagtgtcgagtccctgataaatccgtgagtacgtgcgcgcttgaatatttttagcctctccaccgcccggcagtccgccgccagccccctgcacgatgaagcccgcgactggctgctcctgctgacctcgggccgcgccaccgtggccgatgccaaggccctcaaagcctggtgcgcgcagagcccggagcatgcccaggctttcgagcaggccaaggtgctgtggcaacaactggcgccggcgcttgatcaagtgtcgcaaccgcgcagctttggccgccgtgccttcctcggcggcgccatcgctgcgtcggcagccgtggtgatggtgcgggtcggtgtaccgggtggctttgccgggctcacagcggactatcgcaccgaagtcggcgagcaacgccaagtgctgttgagtcaaggtatcagcctggaactcaacacccagacccgcatcagccgggtgggtgaaggcatcgaattgctcgaaggcgaagtcgaggtggtcacccacgttgcgcaaccgctgcgggtccaggccggtgaaggctcggtcagcgcggtgcaggcacgcttcaatgtgcgcaataccgaccaccgggtatgcgtcacctgcatcgacggttcactttcggtggacatcgccgggcgcagcgtgcgcctggacagcggccggcaactcacctacggcgcggccggtgtcagcgaggtgacaacggtggacacccaggcggtggtggcctggcgtgaacaggtgctggtgttcaacaacgccacgctggcgacggtggtggacgagatcaaccgttatcgcccgggcatgctgctgctgttgaacagggaactgggccagcgccgggttcaggcacgcttcagtttgcagcagttggcgggcgtggcgttgttgatccgcgatgcgtacggggccaagtgcacggagttgccgggtggggtggtgttgttgagttgaggggctgccgctcgtcgggtaactccaatttttacgatgtaaatggaccgggccagaacgctaatctacgcctgtcgctttcaggtatgcctgtgtgctcatgggttgagccaccggtctttttcctctgacagatctcctttcttgtcctctctgaattgtcattctcgtttgtaggggaaaggactttcagcgtaagaaaaaaccaggaaatgtacgtttcaagtctcacttcctatccggtttcttccttcgactgacattgttcggaagcatctgacagccctccaacggctgtgtgacagacagggcgacgccctcaggaacgccgaattttttgtaacctttcctgttttccttaagcgtttcagcctcggcagcatgggtgctctttccatttgagtacctgtgtgagggtgaaaggatgccggctgtttttcgacctgcgctgctggggatagcgctgttttcagggccgcttcttgccgcgtcccccgcgtcccccggcgaccgcgaattggcccgtgagcgtcagcagcaagtgttggaagagcagcgtcgtcgccttgaagacctgcagaacctgcccggccaaatcgctgtgccaacggctcccgcgctgctggaagacggccagtgcatcaccgtcacgcgtatcaacattgaaggcgcgacattgctgcccgaaggccagcgagaggcgctgctgcaaccctggcaggggcgttgcctgggggtgcctcaactcaacgccgtgctcaaaagcctcaccgatcactacctgcatcgcggctacgtcaccacccgcgcctacctgccacagcaggacctgaaacatggcgaactgaacatcatcgtggtcgaagggcgccttgaagggctcgacagctcatcgctggccagcccgctggagtccgccatgacctttcccggcaccgtaggggaggtgctcgacctgcgcgagctggagcagtgggtggatcaactgtcgcgcttgccctcgcgccagccgcagcttgaggtgttgccggggcaggcagtggggggcagccgcgtgacgctcaaaggtgagcgccgcgaaccctggcgtgtctcggccaaccgcaacaaccatggcgatgccagcaccggtcgccagcaggccggtatcggcctggattgggacagccccctgggcctggcggatcaattgaacctgcgggccagccgcgacaccgtcagcgaccgctggcgccattcccacagccagaacctgttctacagcctgccgtatggttggtggacgttcaatgtcagccacagccaaagcttctaccgcacgcgcaacgacctttccgggtttgccttcgcactgtcaggcgagacgtccagccagcagttgcgcgccgagcgcgtgctgcaccgcgataacctgggcaagacggcgttcagctttggcctgagccacctgcggacccgcaactacctggaagacgcgttgctgcgcacctccagccatcgcaccacggagcgtcaactgggcttcaaccatggccgccgcatcggcaacgcctttctcaacctcgatgccggctggcaacagggcatcggcgccctggacgcccagcgcgatctctctacacagcgcggcgcgccgacctcgcgctatcagaaatacaccctgaccctcagctatttgcaggcctttcgctggctgggccagcactggagtgtcgacagccttgccaccggccaacacgccgaagacgaactctatgggccacaacgcctgagcgtcggcggcctcggtgcggtgcgcgggttccagcaacagaacctttcgggcaatagcggcggctactggcgcagccaggtgcgctggcgccaaccggtggcctgggaggcgctgcggccctgggtgcacgaagtgggcgtgggctttggctacgacgtcggagtgatccgccgtggcccgcacaaccctgaagtcgccgggcgccttaccggccatgcctgggaactcagcgcacggggtactcaccttgcggcttcgctggtgcttgcccgttccctggaacgcccggccatcgttgagcgtcgcgaacacccggtctacgcccgaatcgacctgtttttctgaataacaacaaggaacctagcctatggacgtgcgccgcccgttttaccagtgtctggccctgagcctcacaggcatcatcttcctcaacccgattgtcgcggccgccgccgagctgagcgtggacccggccagccccggcaccagcctcggccatgcgcccaacggcgtgccggtagtgaatatcgccgggcccaatggcagcgggctgtcccataacctgttcaccgactacaacgtcggcagcaacgggctgatcctcaataacgccacccaggccacgcaaaacaccgagctcggcggtgtgatcctcggcaacccaggcctgcaagggcggcctgccagcgtgatcctcaacgaagtcaccggtggcaaccgcagccacttggggggctacaccgaagtggccgggcatgccgcgcgggtgatcgtcgccaatcctcacggcatcacctgcaatggctgcgggtttatcaatacgccgcgcgcgacgctgaccaccggcaagcccgtgatcgaaggtgggcggctggatcactttcgcgtagacggcggcgatattgcgctggagggcgccgggctcaatgcccgcaatgtcagccagttcgatctgatcacccgcacggccaagctcaacgcgcaactgcatgccgaccagctcaacattatcaccggccgtaacgatgtcagtgccgacactttgcaggcccgtgcccatgcggaagatggccgggacaaaccgcaactggccatcgatgccagcgccctcggcggcatgtacgccgggacgattcgcctggtgggcactgagcagggtgttggcgtaaggctggcgggcgatatggccagcaccgccggcgacatcgtgatcaatgccaatggcggcctgagcctgtcccacaccaccagcgtcggcgccctcaccgccaaggccgagtcgatcgacttacagggcccgacctttgcgatggctgatatcgacctgcagacccagggcgatctggtggtgcggcagagcctggccagcgccgggaatgtcagcctcgaaggccgcacggtgagcaaccagggcaaggtcgtcagcggcatcctggaagaccggcgtatcgcgggcaaacagctgagcatcaaagcccagcgcctggataacccgggtgaactcaatgccagtggccacctggaaatcaccagcggcagcctcgataacagcggccagatcgccgccgacagcgccaggatcgaagcccgccaggacctgagaaacactggccaggtggtcaccgccggccaacttgaaattgccgccagacaggccatcaaccatgccgggacgctgcatgccgaaggcgatttgagcctggtcgccgacagcgtcgacaacagcggcaagatcgtgggggcgggcagtgcgctgagtattgcggccggcacgttcaccaacgcgggcgaactgctcggcgacaaccacctgcacctgcaggtcgatggcgacctgaacaacagcggcctgatcgccgccaaaggcgatgcctatatcagcgcatcaaaccttacccaagaccacggccagattctcagcggccaagacatccaactgcgcgtgcgcgatgtactgcataacctcggcgtgctcagcgcagcgcggcatatgcagattaatgcggctcaactgaataaccccggcacgctcggcagccaaggcaacctcctgctcactgccaacgtcaccaacagcggcctgctgttcagcggcggcgacctgcatgtgcgtggcgagcatttcagcaatcttgaaggtgacctctacagcgtcggtgatttcagtttcgccggcacgcgcttcagcaacctctccggcaacgtggaaaccgaaggcaacctgcacatcaacgcccgcgagtttgaaaacgcccgcacccaccttgtcctcgaacgcgagctggtcggcggtagtatccaatgggtctgcggccagcactgccacggcaacgacagcttcaagcgcggcactatctacatcagcgaaatctggcgcgaaaccgccgcgcccaactccaccagggcggcgcgactggtggccggcaaagacctgcgcatcgacgcgcagaccctggagaaccgctacagcctgctcgccgccaatggcgacgtgcacctttccgccaaccgccttatcaaccagggcgcggcctcccagaccggcatctccagcaccatcatcggcacccccggtcgcatcgacaaagccctgtgggaccagatggaattccacgacctgccggccttcaataacgcacccttcgaccccgtgcgttttgccgaactcaaggcccgctcgaccggagaggggttcagcaaccccggcaccctcaccacctggcgcgaggatggccgcgaagtctatgccgccacgctgcaagccggcggccgcctcaacctgcaggccaccgagtacctgcaaaacggcaccctgcgggaaaacaccctggcgcaactgaccggcgacattggccacaaccccaacgacctcgaactgagccccgatcgcctcagcgatgacctgacccaaccacccgaattccaactccccagcggtaaatacggactgtttatccccagcaagaatccgggcagcccctacctgattgaaaccaatcccctgttcacccacctggccaacttcctcagttcccagtacttgctcgacaagatcggctacagcagcgacgaagcctggcggcgcctgggcgacggctactacgaaagccgcctgatccgtgacgccgtgctggcgaagaccgggcaacgcttcctcgccgggcagcagagcgacgaggaacagttccgctacctgatggacaacggtctcagcgcccgtgacagcctgcaattgagcgtcggcgtaggccttaccgcgcagcaggtggcggccctgacccacgacatcgtgtggatggaaaaacgccaggtgcagggtgaagacgtgctggtgccggtgctgtacctggcgacggtcgacgccaataacctgcgcgggggcagcctggtgcaaggccgggacatcaacctggtcagcggcggcgacatcgtcagtgtcggcaccttgaaagcggaacgggagctgaccgccgtcaccgacggccgcctgctcaatggcggcacgctcagcgccggtgaacgcatcagcctgctggccaccgacagtatccgcaacgcgatggccggcgagatccgtggcagctatatcgaacttaccagcgtcactggcgacatcgtcaacgaccgcaccgcccatgccaagcatcagggcgacggcacccttgtcacccatctcgaccaggcgggccagatcagcgccgcacagcgcctcacgctcaacgccggacgcgacatcaccaaccgaggcgacatcaacagcgctggcgatgccagcctgagcgccgggcgcgacatcaacctcatcgccgtcaccgacacccaacaggtgcgcaccacggaaaacggcggccaccgggtcacccaacacagccgcaccgaacagcttggcgccaacctcaacgccgccggcagcctgagcctgcacgccgggcgcgacatcaccctattggccagccaagccaacgccggcaaagacctgaccgtcgccgccggtggcaacctccacctgttggccgctgccaacgacaccgatcacgcggtcaacagcaaacgcggcggcgccaaggtgcatgagcaaaccacccaggtgcgtcacgtgggcagccagctcaccgccggcggccaactgagcgccagcgcggggcaagacatcgtgctgcacgccagccaggtcaacagcgccaaggacgcgtatctggtggcgggtgggcagttgcaactgctgagtgccaatgacagcgactacagcctgtatgactacaagaaaaaaagcagcttcggcgccctcaagacccaacgcgacgaagtcaccgacgtgcgtgcggtgggcagccagatcaccacaggcggcaacctcaacctgatcagcggcggcgatcagctgtatcaaggggcaaggctggaaagcgcggcggatatcgccatcaccagtggtggggcggtgaccttcgaagcagtgaaggacctgcatcaggagagccacgagaagaccaacaacaccgcattctgggtggcatccaagggcaagggcagcactgacgaaacgctgcgtcagagccagttggttgccgggggcaccatcgcgatccaggccgtcgacggtttgcagatcgacatcaagcaggtcaatcagcagagcgtcagccagtcgattgatgcgatggtcaaggccgacccgcaattggcttggctcaaggacgcagaacagcgcggggatgtggactggcgtcaggtcagggaagtccacgacagcttcaagtacagccactccgggctggggccggcctcgcaactgatcattgccatcgtgatgtcggcggtcatcgggcccatggcgacggccgcagcaggcggcggtgtcggcggcgccatggtgggagcggttgcgaccggcgcctcgaccaatgccagtgtcagcgtggtcaacaaccggggcaatctcggtgccgtgttcaaagacgtgacgtcgtccgatgccctgaagggctatggggtttcggcgatcactgccggcttgacggtgggttacttcgacccgtggaccggagcgcagacccataccaccatcagcaaggtggccacctccggctcgctgggcacctggagcggcgtcggccaattcgcggccaaccaggcgctgcagaacggcacctctgtgttgctgaacaaagccctggggcagggcggcagtgtcagtgacgcgctgaaaaatgccttgttcaacaccttggcggcggccagtttcaacctggtaggggactacacgaaaaacgtcctggcggacggctcgttacccaaggtggcgatccacgccatggtcggtggcttgctggcagaagccactggcggcgacttcaagaccggcgcattggcggcggcggcaagcgaagcactggttggccacctggatacgttggtcaaaggcaacgacaccctgctcaccatgagttcgcagatcgtcggcgtactggcggctgcggcacaaagcgacaccgacgccgccaagctggagaccggcagctgggtggcgaagaacgccacgcaatacaactacctgtcacacaaccaactggaacgggccgccaaacagatagcccgatgcaccgacgcctcctgcattcaggacgccacgcgcaaattccaggaactgagcctccagcaggacattgacgccatcgtcagctgccaggccgaccccagctcctgcgcggcaagctccaaagaagtcgccaacaccatggcgaacctcaacgccatccgcgacatcgccgactacgcctcgcccgacgcccgggaggcggtacagagcctgatcaacggcaattacgaatttcaggaaatgctggcgaccgccacgaccgagcactcggtgggcgcgatggtcgagtcgctcaagtcgaagtgggcactgagcgatgctcaggcgcaggacattgcgcacaatctgaagatcgcactggcggttggggtggggactgcggcgggggtggtggcttataggcgggctgtggcgggtgggggggcgaaaggtgaagctgctgggttactgccaaagcctggaagcacatctctacccgtcaatagcttcggggctgatgccgattttaaggtggactcgaaccagctaggtacaaaactcggtaaacatgttaaagactatggtgggaatgcggccaattcagccgatcggaaaatggtgcttgatcaaattaatgatattgggaataacccagataaagttatccctggaactttttccggacaaggaacaaatggtacgcgtggagatgtattcttcaggatcaaaggtaatgatgttgttgttaccaagcctgacggaacgtttgtgactatcttgaaagatggggtgactcagaatacatctgtaaaaagtgctttgaagggggaagtaaggtaatgagtatttcatatcttatgaatgcttggttagtgagggcgttaggacgtaagctgctttcagtaaatgcattgcttcatgtgttcgagtcttatagaggctcgatccctcaagaggtttctcttcgatttgaagatttggagagtgggaggctatattgcgggagtgatggtgtgtcgctatgtttttctgaagcgcctattgctgaatgcgatttgggtgagtacggaaaattgattgatttttgtgtttctagtggaagttatttttttgatgttgtcgggcttagattgctttcggtctcggctataaagtcctcggtagaatgtaaagtgataggcgttttattgttgtttgaatatgactcgtttctatcaattttgaatttaggggatgagctctttttttgtgatagggtgccagatgaaataattgccagcgaagggttgacgtttgttttgttgggcggaaaagggggggaggaaaacggggtcagaccctgagggactctagatgcttatcgctctggcagtgcagttgttttaggcaaaaatgcccaaggttttcctgtcgttcgagtcgaaggcgtaaccgggacaaatgtaaatattggagcggggataaacagtcagccaacaaatgtttttgtaatcaaaggaacgaaaagccctagtattgttcctacaagtcctaatcctaaattggtggaatagtatggatgtaattcttagaaatcaaataattgtcgcattgatgcaggcgctgttaggcgcaatttcccctaattttagagccgttataattgatttttcgcagggggtggatgtaaggtttttcttggttgaagatttaattgaagatgttgatgaaatcgatgatgtaattacagagcttgactcgctcgtaatggctattaaggcgctgccaataaagtactgtattgctgtgggagaagaaaggatcagcttttctggtgataacgtgattccgatttatattaggcgcgagtaattggtgcaaatggaatttcaattacgattgaatcaaagattgccgatcaaatgggtaaacggggtcgaacggaaagctctatacagtctgtaattgatcgggtaaacggggtcagacccagagcgggtaaacggggtcagacccagagggatcctcatggcgtctttagtatggacagaaaagagattttaggcgctgtcgatgaggcatggctcaagaaaggtagtcctgtagtcggggatccgggtgcatatgttgtcccgatgggccgagcgattgggacttcgggagaaacgagtattaaaattattgttcggcctgggaccagtcaggacattaccgcctatactgttaaatagagaagttttatatgttgtgtccaaggtgtgagcagggagatattgtcaaggctaaagttatagctgacgacagtagcttgttcgtatgtcaagagtgcgaggcctcatggtttttatacgaagatattggggtcagggaatttttcgactatggggcttatatggaaagtgtagggctgaaaccattatggagtgagttgataattattcctgagtagttgcaaaagccacagcggacttttaccgccggctcggcttcagcatatttggagaactcaaagattacccggtcgctggatacaatcggttttttatgcagaaaagatttggtctcgacaagcataacgctagtcgtactcagccttgaggcaatgacagcaaaaatctaagcaaggtgtgttacccgcgatcgatcgtcgccattcctttccagaagaacacgcaggacgtggtgcatgccttgacccgcagtaccctggaagaagcggtgcaacgccgattgttgtaatgcgtggtcaagtcagttcaacccgaacgtcgatcagccgtgaccggcgttcagcttcctatcaagtcgtaagaattgttcccggtaatatgtaggtcatttcgttttatgcttttccagtccttccaggcacctgctgtttcatccctgcactgttttatagttcacggagcaatccaccacggcagggagccgccccctcatgcatacccggaaaaaatccccccggcgccacaacccacaacccccgacccttcattccggccatcgcctgcgtctggtgctcaacacctacggcattccgcccacggcctttgccgaatggatgcgcgtcagcccgcagtgcctcaacaattggttttcacgcgggctgccggtggatcgcgtggagaaactggcgacaaccttgagcgtcagcaaagtgtggcttgagaccggcgagcgcggactatgacagtggcggggcggccaattcgccgcccctacttcaacggtcccaccacctgccggtatttttccactccctgtggcgtctgccgcaccaggctgatctccagtcccagcgggtcttcacggcgattgccactcaactgccgccaacctttgtccgcttcccatacgcgtacctgcaggtcactgacgccggtcagcaccaccacgccgtcctttgccgccggcagcgggtagcggtcccgcgcgggggcggcagcgcggtagagtgcgtcgcccttgagccaccaacgcacccgttgcaggccatcgccggccgctggggcgctgcggatcacgtccaggcgaaagcccttgctgtcggagctgcgcacggtcacggcggccagtccctctgtttgggtggcttgcgggggcgtcagttcgacactggcacgcaggcttatatcccgttgcatctggttcagcgcgcgcagcaacacttcggtctgttcggtgcttgcctgcaaatgctgatcggcgcgggtgacgctgtccagtccgcgccaggcgatcaggctgaccacggccatgagcatgatcgccaccatcacttcgatcagggtaaagccttgctgggatctgttcatggttgactcactacgcgcatcaagccggcggcgtcgcgttgcaggctgaggctgtgttggccgtcggacagcaccacacgcagcggtgggttgatccattcagcgttgagcaccagggtttgccggggttcgagacggatctgcatcggcgtgctttcccacaggcgtgggcgcagctggtcgtcgtgtttaaaggtgtcgaggccctggccgtcgtcccgctggcggttgaagcgaaagcccttggcatccgcgcgccaggtgatggggcggccgtcggcgtgggcttcggcctgggcgacttgcagcagttggctcaggcgctcggcatccttgcgcaacaggtgcagcgggtcgggcttgatggtgaggctgatggcggcgctggcgatgccgatgatcaccagcaccaccatcagctcgatcagggtgaagccttgctgtttcatcgcgggctacctggagaactggggagtgtgtgaaataaaagcgtgcgaattgacctgtaggctggtgcgacggacaaacaggaggtcctccccatgacatttgcccctcgtttcaccctggcccacggtgtgcaggctgtgggtgtgctggccgcgctggcgggtgtggcggtatggacgccgctgctactcaccagcgccgaatcccacaccccgcaagccacgccccaggcactggcggcgcgcagtgataacccggcgctgcaatggttttccaatgtgccgacggcgttgcaggtcaaggtcaccggcgtactggcgggagcgcggggcgcggtggcgatcctcagtctgaatgacggcccgccgcgcagctttctgctgggtgaacggctcagccccggtgtgcggctcacggccattgagggcgacggggtggagatcgagcgcggcggcgagaagctgcgcgtcaacctcgacaagttgccgccggggcctgcgttgccgctgctcactcggccatgacctgggtgtccagccgcgccaggggcggcgcttcgcggctggcgtcgagcacttgcaggttgacctggaacaggcggccgtcggcgttgatggtctgctcgcagcgcagtttcaggcggccttgatcgcaagtgacgatctgcttgccgctgcgcaggtggccttccaggcgcagttcggcgaggcgactctgcgccgccagcaacgcgatggatttgtctcgcagcaggccgttgctctgggtcatcaacccggccacgcgcacggcggcggccatggccacggcgatgatcgccagcgccaccagcacttcgatcagggtaaaaccttgctccttgcgacggccgtacatggcgctctcaaagccgggaaacaggcccgcagactagcgccggcagttgaccgattggcgactgaaactcccgaggattttcaatacgactgacatgtgttcttgcaacactgcgccacgaattgcactcaagccaaggaatgtcgagatggatatcgcgcgcctaacgtccccattgccaggccctcgcgggcagcgtggcttcaccctgatcgaaatcatggtggtggtggtcatcctcgggatcctcgccgcgatggtggtgcccaaggtcctggatcgcccggaccaggcgcgggccacggcggccaaacaggacatcggcgggttgatgcaggcgctgaagctctatcgcctcgatcacggcacgtacccgagcatgaaccagggcctcaaggtgttggtggagcgcccggcggacgccaagaacagcaactggcgcgcctacctggaccgcctgcccaacgacccatggggccacccttatcactacctcaacccgggcgccaatggtgaggtggacgtgttctccctcggcgccgacggccaaccggatggcgatggcgtgaatgccgatatcggctcctggcagctctaaggcccgccatgaaacggtattcgcccccagtggcgaagcagcgcggcatggcgattatcagcgccttgctgatcgcagcagtggtggcggtactggccggcgccatgctcacgcgccagaccgtatttacccgcagcctcgaagccgaacagctgcgcatccagggccaatggttgttgcagggcggcctggagcgcagccgacagctgctctgggacgcgcgccagaaggacgtgctgacccgtcttgatcaaccctgggcgcgggcccaagggggggccttcgaggggcggatcgaggacgaacagggcaagttcaacctgcgcaacctggtcagccgcgagcaggtggacactgagcaattgcagagcttcgaacggctgtgccgcctgatcggtgtcgacccgacggtgagtcggcgcatcagtcagcgggtgatcgcatcttatgaaccacccgccaaatacccgatgctgcgcagcctggatgagttgagcgggatcgaaggcctcgaccccctcgtgctgcagcgcatgcaggcctatatcagcgtgctgccgggcccgacctgggtcaacggcaacaccgccagcgccgaagtgctcagtgcagtggtgccccagctcagcctggcccaagcccatgggttggtggccgagcgtgacagcgggcagtggtttatcaaccggggtgacttcgtcaaccgcctgcacttgccgcaagtggcggtggattcggtgcaggtgggcattaccagcgagtggttccgcgtgcagggccaggcgcggcgcgagcagcggcgagtcacccttgacgccttgttgcaccgccctgaagaccgccagccacgggtgatctggtcgcgggtgggcgtatgaaacgcttgcgcattggcttgccgccgctggatcaattgagcgcgcagagccaggtccggttcgcctgggtggagcgaggcgcggtcattgaagagggcgacgccagcctggcgcagttgggccagtcgcgccaggcggcggactgcttcctgcatccacgggacagcctgctgaccagcctggagctgccgccattacccgcggcgaagaccgctgccgccgtggcttgtgccgcccaggcgttgatcctcggcgcggttgagcagatgcaggtcgcccacggcccgcgtgaaagcgatggccgcgtgcaggtggcctgggtacccaaagccgggctggagcggttggcgcagttgccactcaagctgcgcggcctgtacccggcgccctatgcactaccggtgggcgcggcagtgttggataacggctacctgctgacccgtgacagcctgcaacaaggcacggtgcacccgctggggttgcaggcgctggacctgccattggtggatgcggcgcagcgttggagcgggccggtgcccacatggggcttgcatggtcgcctcacacagccctcgaccggcggatggggcagggcactggcctgcgtggcgctggccatggccatctggaccctgggcctcaacctgtacgccgcccgccaggtggagcaaggccagcgactcaaggcgctgatgagccagcaggtgcgccaggcgtttccggcgttgccggtagtgctcaaccccttgcaacaggcccgccagcaattggccgcacgccagaccggcgcggccgccgacccgggccaacgcttcccgggcctgctgcaactggtgggaagcaacctgccgttcatggtcggcagtgtcgacagcctgacgtttgaacaggggcgcttgcgtgtcgagctgctcgccgacagccgtaacccgaccgtcgaaggtgaatggcaggcggcgttggcccaggccggtttcagcgccagccgcgatggccaggcctggaccattgctcccgcgcaagccgcagaaaaaaccggagccggcgatgaataaagtccagcgactgcgcagccaggcccgggtgttctggaacggcctggccctgcgcgaaaaacgcatgctcggcggcgccgggctggtcctggccagcctgttgacctggctggtgctggtgcagcccgcgttgaagaagatcgattactggcaagccgagacccccaagctgcgcgcccaggccgcagccttgcaggtgttgttgcaggacgtcgccgcgcccaggccgggtgacgaggccacattgcgccaggcgctggacagcgccgggctgcaagggcattaccagttgcaggcgctcgaacccggcggttggcgcctgaccttcgacaacgccccggccgatgcggtggtgggctggctgttgggcaatgcccgtttgttttccctggaggtgtccgaggcgcgtttgcagcgcgtgctcgataccgtcgacaactcggccggcactctgtccgggaccgttcgcatggatcaggcgcttggcgctaaggaagcttcatgaagtggtcagtcccccctttccgtatggttgcgccgctgctggtgctggccctgagtgcgtgcagcagccaggacgcgtccaagccgttgctggtggacagcgaactcggccaacccctggcggacacccgtcgcagtggcgagactgttctcgaccgccagagccaacccgcgcccaaagcgccggtacagcaccgcgtcaccaacagtgctcgcggccatgccccggcagctgtcaaggcacgcaacccgttgggtgaccagccggtgcaactcaattttgtcgacgccgacatccaggcggtggtacgtgcactgtcccgtgccaccggccagcagttcctggtggacccacgggtaaagggtaacctcaccctggtcagcgaaggccaggtaccggcgcatcaggcctacgacatgctgctggcggcgttgcgcatgcagggcttcagcgtggtcgatgtgggcggcgtcgcccaggtggtgcccgaggccgatgccaagctgctcggcgggccgatctacagtgccggcagcagcggcatgcagacccgcacgttccgtctgcaatacgaaaacgccgtcaacctgatcccggtgctgcgccccatcgtgtcgccgaacaacccgatcaacgcctaccccggcaacaacagcattgtgatcaccgactacgcggaaaacctggcgcgggtggcgcagatcatcaatggcatcgacacccccagcgccatcgacaccgacgtggtgatggtgcaaaacggcatcgccgtggacatcgccgccatggtctccgagttgctggacacccagggcgccgaccagacccaaaagatcaacgtgatcggcgacccgcgctccaactcgatcatcatccgctccggcagcccggagcggacggaactggcgcgcaacctgatctacaaactcgacaacgcccagagcaaccccagcaacatgcacgtggtgtacctgcgcaacgcccaggcgggcaagttggcccagtcattgcgtggcttgctcaccggcgagagcgattccggcgtgagcgacgatgcccgtggcaagctcagcgccatgggcggcaatggcaagaacaccgcccaaggcgcgagcaacgcgcaaaacagcagcggcacccccaccggcagcggcgtgcagtcgggttatggccaggccaccggttcgaccaccggcaccaacggcaccgccaaggatcaggacaccgcgttcagcgccggcggcgtgacgatccaggctgacgccaccaccaacaccctgctgatctccgcgccggacccgctgtaccgcaacctgcgcgaagtcatcgacatgctcgaccagcgtcgcgcccaagtggtgatcgaaagcctgatcgtggaggtcggcgaagacgacgccaccgaattcggcgtgcagtggcaggccggcaacctggggggcaagggtgggtttggtggcgtgaacctgggcggcagcggggtgaacagcgcgccgaccagcaagaccagcatcgatgtattgcccaagggcctcaacgtgggcctggtcaacggcaccgtggacattcccggcatcggcaaggtactcgaccttaaggtgttggcccgtgcgttgaagagcaagggcggcaccaacatattgtccacgcccaacctgctgaccctggacaacgaagcggcgagtatttttgtggggcagaccattccgtttgtcaccggcagttatgtgaccggcggcggaggcaccagcaacaacccgttccagacggtgcagcgtgaagaggtggggctcaagttgaacgtgcggccgcagatttccgagggcggtacggtgaaactggatatctaccaggaggtcagcacggtggatgcgcgggcgtcggtggaggcgggcacggtgaccaacaagcgggcgatcgataccagtattttgctggatgacgggcagatcatggtgctcggcgggttgctgcaggatgggtacagccagagcaatgatgcggtgccgtggttgtcggatattccggggttgggggcgttgtttcgcaatgagaagcgcagtgtgaacaagaccaacctgatggtgtttttgcggccgtacattattcgggacagtggggcggggcgcagtattacgttgaatcggtatgagtttatgcgcagggcgcaaggggggttgcagccggagcatagttgggcgatgccggatgtgcaggcgccgcagttgcctgcggtggagaaggcgattcctggtggccggccttgagcgttttgaccgtgtacatatctattccttcggtaacggcggcttatggttccgcccttacggcggctcacttttggaaaggcccaaaagtaagcaaaaggccttcgccccaccactcggcacctcgcctaggctcggtgtgccctcactccagcttgaatccgtgggccgccgccacgcgccatccatggcgcggggcggctaacccggcgtcctgccgggttacccacggattcaagcctgcgttcggccagcgtggttttacggggcgccgaagagcaagagcaagagcgactcgcttcgcatcgtggatacgttttttgttttgtgttgccgccctactgtggcgagcgggcttgccccgcgttgggctgcgaagcagccctaaaaccagtgtgagcgccgcgttcatcctggcttcccgcgtcatcgttaacgaccatcgcgggcaagcccggctcctacaggggaacacgttcgcttccacgactcggtcggctattcggccgccgcgctttgcttttgattttgatcttaggcgccccgtcaaacacgctggccggaattcggcagggatttggggggtaaaccggcagggatgccggtttagccgccccgcgccatggatggcgcgtggcggcggccccccaaatcactgtcggattacgggcacaccgagcctgggcgaggtgccgagtgttggggcaagagccctttgcttactttggggcttttccaaagtgagccgccgtaagggcggaaccctaagtagccgttaccgcagcaacggatatgtacacctacaaacagggccaaaaccatgagcctattgccctacgcctgggccaaatcccaacgcatcctcctgcgccccaccgaagcaggccacctgctgacggtgtgcccctcaacccccggctggtccatcagcgaagtccaccgccagttcggccaggcccagctcgaacaggtacgcgacgacgaactcgacggcctgctcaccgccgcctacgccgacaccggcagcgccgccgccgtggtgggcgccgccgaaaacgaggtcgacctcgaccgcctgatgcaagacatgcccgaagtcaccgacctgctcgacacccaggacggcgccccggtgatccgcatgatcaacgccttgctcacccaggccgcccgcgacgaagccagcgacatccatatcgaaccctacgaaacccattccgtggtgcgctaccgcgtcgacggcaccctgcgtgacgttgtttcgccgcgcaaggctctgcatggcgcactggtgtcgcgcatcaagatcatggcccaactcgatatcgccgaaaaacgcctgccccaggacgggcgcattgccctgcgcgtcgccgggcgtccgatcgacattcgcgtgtccacggtgcccaccggccatggcgaacgcgtcgtcatgcgcctgctggacaaacaagccgggcgcctgcagttggagaccctgggcatggagccgcagctgctcgcgcgcctggatacgctgatccgccagccccacggcatcgtgctggtcaccgggcctaccggcagtggcaagaccaccagcctgtacgccgccctggcgcggctggatgcgagtaccagcaacatccttaccgtggaagacccggtggagtacgacctgccgggcatcagccagatccaggtcaacgccaagatcgacatgaccttcggcctggccctgcgcgcgatcctgcgccaggacccggacatcatcatgatcggcgaaatccgtgacctggagaccgcacaaatcgccgtgcaggcttcgctcaccggtcacttggtgctggcgaccttgcacaccaacgacgcggtgtcggcggtcaaccgcctgatcgatatgggggtggagccgttcttgctggcgtcgtccctgctgggggtgttggcccagcgcctggtaaggcgcctgtgcccgcactgcaagcaggaagaccccgctgcgcccggcacctggcgcccggtgggctgcgcgcagtgcaaccaggtcggctacagcgggcgtaccggtatccatgagttgttctgtgtcgacgacgcggtgcgcagcctgatccacgagggtgccaacgagcaggacctgcgcctggccgcgcgccgcgccgggatgttgagcatgcgtgaagacggtgaacgctgggtgcgcagcgctgccaccgcccccgaagaaatcctgcgtgtgacacgggacgcctgatgaatcgctatcgctacgaggccgccgatgccagcggcaaagtcgaggccgggcatgtggaggctgacagccagagcgcagcctttgccaacctgcgcagtcgcggtttgaccgcgttgttggtgcagatcgaaggcaatcagctggccgcgacgggcagcagcctgttcagcgccaagctgtcggacaacgacctggcctgggccacgcggcaactggcgagcctgctgggcgcaagcctgccgttggaagccgcgctgagtgccacggtggagcaggccgagaaaaagcatatcgcccagaccctggcagccgtgcgcgccgatgtgcgtggcggcatgcgcctggcggatgcgttggcggcgcgacctcgggattttccgtcgatctaccgcgcgctgatcgcggcgggggaggagtccggtgacctggcccaggtgatggagcgtttggctgactacatcgaggaacgcaacaacctgcgtggcaagatcctcaccgcgtttatctaccccggcgtggtggggctggtgtccatcggcattgtgattttcttgctgagctatgtggtgccccaggtggtcagcgcgttctcccaggcacgccaggacctgccggggctgaccctggcgatgctcaacgcgagtgacttcatccgcgcctggggctggctgtgttttgccgggatcgtcggcgggttctggagctggcgcctgtacctgcgcaatcccgtggcgcgcctgaattggcacagccgtgtgctgcgcctgccattgatcgggcgttttgtactggggttgaacacggcacgattcgcctcgaccctggcgatcctcggcggtgccggcgtgccgttgctgcgtgccctggaggccgcgcggcaaaccttgtccaacgaccggctcgaccaatgcgtcagcgatgccaccgccaaggtgcgcgaaggcgtcaacctggccccggcgctggcggtggaaaaggtcttcccgccggtgctgatccacctgatcgccagcggcgagaaaaccggctcgctgccaccgatgctggagcgggcggcgcagacgctgtcgcgggatatcgaacggcgtgccatgggcatgaccgccttgctggagccgctgatgatcgtggtgatgggggccgtggtgctggtgatcgtcatggcggtgctgttgccgatcatcgagatcaaccaactcgtcacctgactgtgggagggggcttgcccccgattgcgcagagtcagtcactacatctttggctgacccactgcaatcgggggcaagccccctcccacatttgaactgtgtttattcaatgggtttttgtgcgcacctgatgctgccccgtccaacctcgggttcctcattccgtcacatcccgacagcccatgccgcctccagccaaacgcgctgaaacctcgctgtcacctgcgtccaaagcgctcggaatcatgaccaaaacacccgagaatctttttaaaaatcaaggtgttcctcccgaggttttttcctacaaacgtcatcggaaactgcgaatttctctcccatggttttcacccctggccacccccgcaagacggcttgggaccgaagccatggcgtcatgcaagagccatctaccccaaacgtacaaacacgacgaaaggagattcttcatgtttaagcgcaacgttctcgcggtatccatgaccctcgctgcactgtgctcggcccaggctgcaatggctgacatcaacggcggcggcgccactctgccagaaccgctgtacaagactgctggcgtactgactgccggttttgccgagtacatcggtgtcggcagcggcaatggcaagtcagctttcctgaacaacgactacaccaagttcgtcgccggtgtgaccaacaagaacgtgcattgggccggcagcgattccaaactttccgccgctgaactgctcgcttatcaaaacaccaagcaagccggttggggcaagctgatccaggtaccttcggtggccacttcggttgccattcctttcaacaagaccggtgccggtaacgtcaacctgaccgttgaccaactctgcggcgtctactcgggtcgtctgactacctgggaccagatcaccccaggccttaccggtaccatccaagtggcttaccgtaaaggcgccagcggcacgaccgagctgttcacccgtttcctcaatgccaagtgcaacccgacattggaaaacggtactttcgccgtgacccagactttcgaaagcagcttctcccgtggcctgccagcgggtgcaatcaaccctctgcaagaagtcaacccagccagcactaccacgcctaaagaaaccttcaaggacaccagtgaaggtgtgatgggcttgctgaacaacgctcagaaccgcatcacctacatgagcccggactgggctgcaaccagcgtcgccggcctgggtgacgcaaccaaagtcgccacgatcggtggtgtttcgcctgcacctgccaacgtttcggccgcgatcaacgcgatccagccgccagccgtcgccagccgtggcgaccagaacgtctgggtgcctgtgttcgcagcgactaccaaccccaacgacgccagcgtcgtgcaatacccaagcaccggctacccaatcctgggcttcactaacctgatcttcagccagtgctatgccaacgctgatcaaaccacccaagtgcgtgcgttcttctccaagcactacggcgctttgtccaacaacgacacggcgatcaccaacaaccgcttcgtaccgctgccagccagctggaaaaccgctgtgcgtgacaccttcgtcaccgcgtccaacggtttgagcatcggcaacacctctgtttgcaaccaaatcggtcgtccgctgtaacccacgtttcaacgacccgcgacaccgatcagcaacggcctgtgccgttgctgatttttttgcgttaacagccccatgtgaactttccatgacagaagttcagtcccgtgcctcgacaaccgcctactcctcatacgtgagcctgtcttgctgcctgtgcgcagacaaatgtgtgatgacaaagaaggaagactccagatggtccgctgcaaatcaccggttaacctgaaagcccaagagactatcctgcgcctgaagccactggcccacgccatcgccttgttgatggtggcaggcaatgcccaggcggccacggcgttcagttccagctggtttgccgacaaaggcgcgacccaggcggcgacggcggcacggatcagcgcaggtcaggtaccggggattccgtcgctgaacgaacaggcccgggtcaaccagcagttggcgcgttccatcagcacactgaacaccagtgtcgcggccattgctgcgcaacaggcggcgcaggcagctgggcgccaagcggcgttgggccaggtctcgaccattcccgatggcttgggcaagggcggcctgcaggtcgataacagcctgacccagggctggatcaacgccaagaacccgacccagagccagtccggcggcaagaccaccgtgaccatcgagcaaaccgccgacaaggcgatcctcaactgggagaccttcaacgtcgggcgcaacaccaccgtggatttccagcaacagtccaattgggccgtgctcaaccgtgtcaatgatcccgattcgcgccccagcgagatccaggggcagatccagggcgccggcaccgtgatgatcgtgaaccgcaacggtgtggtgttcagcggtaccagccaggtcaatgtgcgcaacctggtggccgcggcggcgaacatcaccgatgaacagttcacccagcgcggtatctatgtggatgccaatggcacccaggcgaccttcaccgatgcggcaggcaaggtccaggtgcagcgcggtgcgttgatccagacccataaggctgcgacctccactgacgccggtggttatgcgttgctgctcggttcggaggtggaaaacgccggtaccatcatcaccgccaaaggccagaccacgctggcagccggtgacagcttttacatccgcaagggcgtcgggactgccggcaatgatcggtccaccacccgtggcaatgaagtcgccaccagcctcaaggccggcagcacggccggcaaggtcaccaacgaggggctgatcatggcctctacgggtgacatcacccttacgggtcatcaggtgcaacagaacggcgtagccctggccagtacctcggtggacacgcgcggcacgatccatctgctgaactcggcaaccgatcaaaccggcagcgtgaccctgggcgagggcagcaccaccgcgatcttgctggacgccagcggcagcacagccctcaacagccagaagggggccggcctggaaaaattcgatggcctggccgccaacctgatcacgggccagttcaacaacctcagcgcggtggccgaccgtaccgaccagtcgcgtatcgaaatcgtcagcggcggcaccgtggacttccagaaaggctcgatcaccctggccaccggcggccaagtcgcggttagcgccaccggtcgcagcctggtgcgcgatggcgcgatgatcgacgtgtccggtgccattggcgtcaaggtgtcgatggacgccaataacatcaagatcaacgtgcagggcaacgagcagcgcgatgcaccggtcaaccgcgatggcgggcaactgatcaacaatgatgtctgggtcgacttgcgtgaactggtcttcgtaccggcaggcaccaatggttatgcgacagaccgctggtacaccgcgggtggcttgcttgaagtcggcggttacctcggcacacagggtcattcggtgggcgaatggatggcccagggcggcaccgtgacctttaccggcaaggaggcggtgacccaacagggtgcgcagatcaacctgtccggcggcaccgtggatgtgcaggccgggtatgtgcgtcagacctggctcaaggggccagatgggcggttgtacgaactgtcgacggcaccaggcgacattctctattcggggctctacaaaggttatgaagacaccagcacgcgctggggccagaccgactactactacaacccgatgatcgccacgcaacgccgttacgagaacggttacaccgtgggccgcgatgccggcaagctggtcatcggtacgagcagcgcggtgctcgaaggccaggtgatcagcgatgtgttccagggcgatcgccagacccaggcgccgaatatcaacctggacggttaccagcagtcccagaaggccaaagcccagcgtgcacagttgatcattggccaatacatcccgatctacaacaaggccaccggcaccctgcgctacgccctcagtggtaccaccgaccaggtgctgatcgacagcaacacgcagaaaatcgcagacggccttgacctcactgccgcattgccggcggaccgccaaggcaagttggtactcgacagtgaccagctcaatggcttccagctgggggcgatcaaggtcggcgccaagcagcagatcaccgtcaacggcgcgctgaaagtggccgatggcggcgacatcaccctgttcgggccgggtgttgccatcaacgccaacctcacggcccatggcggcagtatcaacgctggcaacattctcacccaggttgaccgcgacaaaggcaacgcggtgggggacgtgatcctggcgggcagcgggcggcttgacgtggcctccggggtcaagctggaggccggcggacgctggaataacctcgcgctggaccccgccaaccgtgaaggtgtggcgtatatcaatggcggcaaagtgtcgctgcgcagcaccaacgtggtcaacctcgctgccggtagcctggtggatgtgtcctcgggcgccacggttggcgaagacggcaagctcagtggtggcaagggcggcgacgtgaagctcggcggcctcggcagcctcggcctgggcggcgaggtgcgtggctatggcgtcaacggcggtggcaccctggcgttgcaggcgcacaaggtgttgatcggcacaggtgcggtagatgccgacaccctgcagttgggcggcgactttttcaacaaggggttctcggcgtatgacatcaccggtaatgaagggctgatcgtcgcgaacggtacccaggtcgatgtgaacatgccggtctaccatgtgggcgagcaggccaccggcgcgccgaccggcagcgatgcggcaagtgcgctcgaacgctggaccccgccgctgtaccaggaggacgccaccaagggcgtgctgacccagcgccgtggcgcgagcttgagcctgagcgccggccatacgctgtcgacggccgcgcagatggcgacgacggcactgaccgtgggccagggggcggtgatcaacgtcgatcccggccaggcgatcaacctgcagagcatcggccagctcaccctggacggcacgctcaacgcgtggggcggcagcgtcagcctcaagggcttgaccacggcggactcggaaaaagtcgaggcgatcggccatgggcgttcgatctggatcggcgaacacgcgctgatcgatgtggctggccgtgccgtgacggctgtggacaatcgcggcggcatttatggccaggtgcgcaacggcgggacgatcacggtagggggcgacattgaccccaccaccggggttgccaagaccagcaacctgttcgtggtcgtgcgtgagggcgcgcgcctggatgcttccggcacccaggcgttgctggatgtgccaggccaggggcgcacgacggtggcaagcaacggtggcaccctcgcttttgcgtccagcaacggcctgtacctggatggcagcttcaaggctaatgcaggtggtgccggtgcggccggcgggcgtctggcattggcgctggaggcaccgtattacctgcgcagcctggccaccaaccgagtgttaccggtgcgcgagctggttctgagccagcagtaccaggcgcaagcgctgccaggcagtgccgaagcggcggccgatgcgttgacctacggtcatgcccggcttggcgtcgaccaggtgacggcgggcggctttgatagcctggccctgttggtcaatggcgcgctgaacatggcgggtgacgtttcgctggccatgggccagagcctggaggtgtactcacaaggcatagggttggcgaagaacgcgcccgtgaccgcccaggttcatcttgcggcgccccatgtggtactcagcggcatgctcgcgccagatcggaccggcatggagagttacatcacgccgtacctgggtgacccggtatcgactgttccggggcagggccggttcacggttgacagcgatctgctggatattcgcgacaaagtcacgtttgccctcaaccagggctttgaccgggtcaatctcaacagccgtggcgatctgcgttttctcgccggacgcgatggcggcgtcacccccaatggcttcagtacggtcttgcagtctggcggtgacctgaccttgcgggcctcacgtatctaccccggcagcgaaatcgccgcgcaagtgctggtgggcctcaccggcagcacggccaccggtttattgttcgatcccgcgcgtaccctcaccctggaaaaaaacggcgacgccagcgtggtcgctccgtattcgattttcggtcgcctgcaattgggcgcagcgaccatcaagcagggcggcgtgttgcaggccccgttgggtctgatcgaaatcggcaaccagggcagcacccgtgtcgaactgctgcccggcagcctgacgtccgtgagcggcaaggggttggtgctgccgtacggcggaaccgtggacggccaggtctaccgttacaacggtaagaccgtgaacttcatcggccagggcggcgtgcgcaatggcaacggcgacctgacggtcggcgtgatcctgggcggcaagtcggtggcggtactgcccgacgctaccctggatttgtccggcggcggtgagctgctgggggccgggtttatttccggccgggggggctctacggatgcgcgctataacccactggtgcagttcggcgccaacggcgggtttgtgctgccgggattgagcaccaacccggtgtacgccatcgtgccgggcgcgcagccagggtatgcgcccgtggccgccgagggcggtgcggtagcacctttggtcggccagcagatcaccatcggcgcgggtgtgccgggactgccggccggcacctataccttgatgccgtccacctatgccctgatgcccggcgccttccgggtcgagatcaatggcctggcggggaccggcagcggtgccggtgtcattgcgatgcgcaacggctcatggtccaccgccgggcagctgtcgatcatcaacaccgggatccgtaacagccaggtcagccaagtgatcatcacgtcggccgataccttgcgccgttattcccagtacaacgaaatgagttatgcccaattcgccgtcggggatgcggccaagctcggtgtgccacgggcgctgatgccggtggacgccaaaacgctcaagctggccctggatgccggcggcggcagtgacaccttttcgttcaagggcattggccggttcgaagcagccccgggtggctatggcggcacggttgcggtcaccagcagggtgcccaacggcgcaatacagattgtcgacgccaacagcccgttgaccgaagcgttcagcggtgtgacggtggatgcgcaaagtctcaacgccatgggtgccaagcgtttgctggtgggcggtttgtcgatggtgctgtatgggcagagtggcaacaacgtcggatttgccaccagcatggccgggaccatcaccctgcgttcaggcgcgaatctggtggcgccggaagtgatgatggtttcgcgcaatggcgatatcgtggttgagcaaggcgcctccatcaataccctcggccagggcgcggcgtcttatgattcacgcgatggctttgtctacagcagcgcgcccaacatgctcgtggtctccaacggcttgatcaatgtgctgccgtatccggaaacggccggcaggggcggcggcatccggatcggtgcttgcgtcacgagcccttgcagtgggcagactgcgttgtattccgaaggcagtatcgtgatctcgaccacccaggccctggagctgaatgaccaggtgcgctacggcactcgccacctcgcactggccttgagcaacatcaacgtcggcagcgtcgaggccctggccgatgccgccgcacgcaacgtgttgccggcgggcttgaccctcaaccagcaggtgatcaaccgcttgctgcgcggtgatacccagtctggcgcaccggccctggaaaccctgcaattgtcggcggcccaggcattcaacttctacggcaccacgacgctggacacgtatgatgcacagaccggcaagtcgctgctgaacaacttgttgctgtccacgccggcgatctacggcgccggcaatgccaatgacgtggcgacaatccacaccgccaacctgatctggcagggcgccgaggcgcctcccggcgccgtggttgccggcggtgccggcaccggcagtgggcgcctggatatcaatgccgagcgcatcgagttcggctacggcgcctttgcccagcccagcaccaccaagactttcgaccgcctggccctgggctttgccaacgtcaacctgaatgccagtgaccgcattacggccaactacaagggcagcttgtcggtataccggaacctgaccggctacgacccggtcaagggcttccagtacagcggcggcaacctcaatatcctcacaccactgatgaccggtgaagccggctcggtcaaccgtatcactgccggcggcgccattgatgtcgccgccgccgccggtgcgcgggggaccgccaatggcatgggcgccgagctgtccctgcaaggcgacagtgtgcgagtagccagcgccgtggtattgcccagcggcaaggtcaagctcggcgcacggggcgacgtggtactgacggacggcgcattgatcgacgtcgccggacgctcggtggtcttcaacgacctcactcaatacggctgggggggcgaggtattgctcgacagccgcagcggcaatgttttgcaggcggcgggttcgaccatcgacctgtcggccaaacataaccaggccggcaaactgcgtgcggttgccgttgatgcggcaggcggtattgtcgacctgcaaggccgcgttctcggcagcagcaccggctactaccacgctggcggcaccttgatgccttatacggcgggcagcgtggaaatccaggcacaacgcctgggcggcaatggttcgctggaccaacagtttgccgacctcaaccagcgtctcaatgccggccaggtgttcggtgcgcgcagcttccagctcaaacagggcgacctgaccatcggcgaggggctcaaggcgggcatcatcaacgtctcggtcgacaacggcagcctgcgggtcactggcctggtggacgccagcggcgaacgcgtcggcagtatcagcctggccggcaagaacggcctgaccctcgcgggcagtgcggtgctggatgcccacggcagcaagttgcgggtggacagctacggcaagatcatcgattcgccgaaccgggccatggtggcgctgagttccggtaacggcgtgttgaccctggccgaaggcgcgcgcatcgacctgcgccacggcaccgcagccattcgcggcaacgatgggcgcaatcgcggcaccctggagctcaacgcaccgcgcctggccggggccggcggcgtcatcaacgacatcgccatcgacgcccatggccgcgtggacattcaaggtgctcgcgcgatcaccctcaatggcatggccacctatgacgatgcgcccgagaaaaccgatccaaccgccagcggcaaaccgtaccagcaaatcacccaggattatctgaacgacaaacatagactgagcacggactttatcaacgcggcgctgctcaacaacaacctgctgcaaaacaagctcgccggcttgaataacgacacctacggcgacaccttccacctgcgtcccggtgtggaaatcgtcagcaagacgccagacggcgacctggtggtgcagggtgacctggacctgtccggctatcgctacgccagcctcaagtcgccgacccatgaaaagaccgaggccggcagcctgaccttgcgcgcggggggcgacctgagcatctacggcagtatcaacgatggctttgcgctgccgccggagactgtagacgacaagggctgggtgctgttgccgggggttgacttcaccggtggcgatatcgtggtgccggggcagggtgtgagcctggcaatcggcacggccttcccggcgggtgtggtgctcaactacgacctgccgatcgccgacatcggcgtgagcgcaggcacccgtttgccggtgcgcgccaccctcagacaggacctggtgctgccagccggcaccgtgctggcggcggcggtattcgacagcacgggcaacgtgctgtttgccgctggtaccttgctgagccaggcgcagaccctggtcagcgggtcgcaactggacgccggcagtctgttgacccagaacactttgttgaaggcgatgacctggcccaagggcgtgccgctgccgcagaatttccaggcgcctggccccacccagaacgtggtgaccctggcccgcgatttgttgttgcccaagggtgcactgattccttccggtaccaacgtcaagttgctcaacgatgcgacatcggtcgagctgcgtcccgaagtggcggggcgccagggccagaactgggccattgcaccgatgctggccgagggttcgcagtcgtggtcgctgcggctggtggcgggcgccgacaccgaggcggccgacagtcgtctgttgcaacctcatcccacaaccggtgacctgcgcctggcggacagtcactacggcatgttcgccaaggagctgccgtcccaggtcgtgcaaacgtggtctgcggccggggtcgagctgctggcgagcctgggcaaggacgtcaaggtgggtgacccgatcgaacagtcgctgctcgatgagctgggcggcggtccgatcgccgatttctgtgcgggttcgccggactactgcgcggtgaagccatcgtttgtctggaccgcccaggcggtggcggacctggccgagtacggcctgacggaaggcgcgccgattaccgatgcattcctggcgcaatttaacaccaccaccacgcagttctgtgcggataaccccgcttactgcctttcccaatcggtcaaggagttcggtgcaagccccgccgcgacgcgcttcagtgtgatccgcacaggcaccggcgatctggagttgttgagcgccggcaacctgagcatggactcgctgtacggggtgtacaccgccggcacctcgtctgccgccaccttcgcgggcgacccgtacaaccagcccaagtccaacggccggggcaagaccgtgctgaacgacgagggcagctatttcgagcaattcgtcaacgccagccccaccagcctgtaccgcgcctggtatccgcaagcgggcggcaacctgaacgtgaaggtgggtggcaatctgacaggcaatatcctcaacgtcacggcttccgcgcctggtcggccaaaccctctggataccggctacgattcggccagtgtcggcaactggttgtggcgccagggcagcggcactgtcgatacgggcggggcagcgcagcccacggcctggtggatcaatttcggcagttacaccgcgaccgccacagctgaccaactggtgggctttaccggtttcggcaccttgggcggtggcgacgtggatgtacgggtaggcggtgacgccgggatgcttcgctcgctggccggcaatgccatggcggccaatgccagcccacgcagccagggcttggtgctggcggtcggcagcaccgggcgggtggccagtgatggcagcctgcaactcaccggtggtggtgacctgcgggtgcatatcggcggggcgcttaaccctgaaagccagcttgatagcagcagcttgaacggcacactggtggacctgcgcggtaacgctcaactgctgggcggcgcctcgggccggatagagttgcagtacggcattgccaataccgaccacagcccgggtgaagtgcgggcgttcgacgcgttgcaggccacccgggggctgacgcgcggcggcatggtgctggtgccgggtgatgcgacgttcagcctggcgaccctgggcgacctggcgttgcagagcgtgatcgaccccggccgggtattgctgcccaacagttcgtcatttgtccgggggcaggaacacggcccaggcaccagttggttctcgctgtggaccgggcaaacggcgatcgacctgttttccgccggcggcaacctgtcgcccaattccacggggctggcctctgacctggcggtggtctatccgtcgatcttgcgtgcgacggccgccagcggcagcctgtactacggcaaggcgggtagctcttccttgaccgacaacgattacaaattcccgttgttgcttgctccgggcgtgaacggccagttgcagttgctggcccatgattcgatctatgccggcggcacgttcgtgagccaatcggcagctgatccagcgatcatggccacgccttggcaaccggcatttgtcggcaggctcggtaccgacatcaagcctgtcgccagcaacctctcgccaaacggcagttccgacaacgtcccgcttctaccactgtttgtgtttggttccgccagcgcgtcgaccagcggttatgctccggcctccgctgcgcgtttctacgcattgaccggtgacctggtgggtgtcagcagtgggcggatcatctcgtttggggtcaaccccggcgatctgcatcaagggcagacctggtacgagggcggtggtgccgtgtggatgatggcaggccgggatattgtcagcagtggcagcctgtttgaccgaatcagcggttaccagagagaaacgtccatgggcaacctgtttgtccacaacagccccaccgatatctccatcgtgtctgccgggcgcgacatcctctacagcaacttccaggtcgccgggccgggcgcgttggagctgacggccgggcgtaatatccagatggacgacaaagtcagcgtcaccagccttggccccgtagcctcgggcgataaccgccccggcgcgagcattgtcatgcaagccggcgtcggccccgacggcccggattaccgtcgcttcgtcgaggcctacctggaccctgtgaacctggcgcagccgggtgagtcgatccagagcggcaaggtcgccaagacctacgagaacgaactggtcggctggctcgccgagcgctttggttttgtcggcggcaccgagcaggcgcgcacttactacgcggcgctccccgccgagcaacaacgggtgttcgcccgcgacgtttacttcgccgagctcaaggccgctggccgtgagtacaacagcgctggcagcgtgcgccagggcagctacctgcgtggccgcgtagcgattgcggcgctgttcccggacaaggacgtggccggcaacccgatcacctacaaaggcgacatcacgatgttcggtggcgcgggcgtacacaccaacttcggcggttcgatccagatgctcaccccgggcggcagccagaccttcggtatcgaaggcgcggcgccaccgtcgacggcgggggtgatcacccagggcgcgggggatatccagctgtattccctgggcagcatcctgctgggtcagagccgcatcatgaccaccttcggcggctcgatcatgggctggaccagcgaaggcgacatcaacgccgggcgcggttccaagaccaccgtggtgtacacgccgcccaagcgtgtctatgacaattggggcaacgtcggcctgtcgccgtcggtgccgagtaccggtgcggggatcgccacgctcaacccaatcccggaagtgccggcgggggacatcgacctgatcgcgccgctgggcaccatcgacgccggcgaggcggggatccgtgtgtccggcaacgtcaacattgccgccttgcgcgtggtgaacgcggcgaacatccagacccagggcaagtcgtccggggtgccggtggccgccagcgtcaacaccggcgccatgagctcggccagcgcggccggggcggcggcgtcccaggcggcggaagacgcggcgcgcagccagcaggcggccgcgaagcagggcaggccgtcgatcatgactgtggaagtgttgagcctgggcaacgaaccgttgccgcaagagcctgcgccggcgcagaaaacctccggctacaaccccaacagcccggtgcaggtgctgggcgcagggccgctgagcgaacaggcgcgagcgcggctgacggatgaggagcgcaagcagatcagtttgtaaggctgtggaaaggacctctcgatgtaccgttcggggcgatcaatgatcgcccctttttttgcgccggttacgggttgtccttgagggtcttgaacgactcgatgcgtttgatcagccgcgtgttcttcgccgagtcggcattgctgaacaggaaggagaagtccgacgccagcccggattttccggcaatcgccgcgtactggtggcagtcgttgcagttgtcggtctgcacgtaggtttccatggtggtgttggcgacgacgacactctggtcgctgacaaacggcccataggacagcggtacctgcacgttcggccctgggcctgggtcgttgggcgcattgggcgtcttggaccacagcacattcaccagtttgtagtactggaataccgactggccctgggtctgctgggcgaaggtctgctgcactgccgtgttcagcgcctgcatgtcctggggcgtggcgttggcgcgggtggcctgcaccggctggtcgaggggcgtgcagttgggcggcgtgtgcgtggcgtcgcactgcacgcggggcacattcggcgtgcaggcatcaccggtgcatgccgggttgttgaagctgtagccctcgggcggcgcggcaccaccgtcaggcacgttgtcgacctgctcgaaggtggtccagatgaaattcggctgggtctgggtcttgttgatgatatgcaggcccaccaggccaatcacttcctgggtgcattgcagcgtgtccgggcgttgcagccaggccacggtggtcaggtagcgcccgtacagggcgggcttgttggtgagcacgcgccaggcggctttcagttccagggcgccgagttcttcctgcggcagcgccttggccggcagttcacgcaccagcttgccggccggcagtgacaggccggcggggtgccgtttgtcgctgttctgcgccacgatcagctggttggccgcatcgtacaaaccgttgtcgacgatgtagtcgaactcggccttgcccaccttgcgctcgaaaaacaccaggttgccggactggtccgttagccaaccgccggaggcttccatgatcgaatcgggcagggtcacctgggtgccgctggacaggtggaagcggtgcttgcggttgatcgcgctttccgaggtggcggtgatgaatttacgcgcgcccgtggcaaacgccttgaggttgccggtggcggtgcagttggacggcaccagggtttccacgccccagccggacggcttggccgcgccgggcaggaagatctcgctggcatccttgtagcttgcccacactggtgccttgctcatcggttggccgggcgttgatggcacgccgaactgggctgcgctgctttgcgtatccggctcaccggccaggctcgggttggccggccagccggggttgaccggccagttcatggcgatgaacaactgccagccgaagcagttgagaaaggcctgctcggtgccgaaattgttcaccggcaggaagccgccgctggtggggtcgaacaccaactggctgacgcagctctgggcatccgaggcggcactggccggtacgggggccagccacgggagaagggcgcaggtgattgtgcagacaatacgcaagcgtgcccggcgcagcgggcgaagccatccgttcatggtcgcattccttgctcaagactttaggggcggccacccacgccaggcatgggcggccgggtggaactcaggcgctgggcaccagggccaggccgctttcccatgggtgctcggtggcactcgggttggccgcttcgttggggttgagcgcacgcacgctgaccagccccggcgccgcgttgctgctgacggtaatggtcatgatgtagccctgggtgccgccgccgtcggtctgcccgggaatcgccgaggcatccggcaggaactgcgtgacctgggccgtgacgcccgggttggagaactgcacccgtgcatccgccgccgtggtgttcgggtcggcgccttgtaccaccaatacgaactggcctgagctgccgggcgcaaagctggccggcaagtcgctgggggattgcccgtagaacaggtcaatcggcagcaactgcacgggccagggttgcgcatcggtggtgttggccgccacgcaggcacactccttgggctgggccgtgagcggcgcaggggtcacgctgagggccacattcagttcgttggcgatcacccacacgtagtcgatcggcgtgccgttgatggtgatgtcattgatcgagaaccccgcgctggtcggcacctcgaagaccgcctggagaatctggtcggagttgttcgggccggtgccggcggtgccacgggtaacgcgccagtagctgctgacatcctggccttgcgggcctttccaggtgctgaaggacttgggttgctgcaggtacaggccgatggggttggtcaacgagatcaggttgttgaccgccgcctggttggcggagaacccgatatgcgggtcggagttgcggtagttctgcccgtactgcgcgcagcagatcaggctctgctggttctggctgctgctgagcggccgcaggatggtggcggccgccgccaggtagatctcggcactcagggtgttggggccggaggtcaggtgcatcgcgccacccgacacgcccggtatgcgcacggtgccgctgttccatttgttcacggtgtcgtaggcgggctggccggtggtggggtcgagcaccggttcgccggccttgccggtcgggccgtcggcggtgtagcgcaggtacaggtcttcgagtttcacctgcgggtcgacatacgcctggtacagacccagcacggcacccgggtcgatgttccacatggtcaggaagtacgccgggttctcgctggtgaacatgatgctgcgcatgctgccgtcggggtcgcgggtgatcgaccactcgcagtattcatccagccagccccgtgggccagagggcgaaaagtcggcgtaggggccgttccagttgatggatttgcacagcacgctggggatctgcagttgggtcgcctgcgggtccgggtacagcgaatacagggtgttattgagggtgatctggccgtggtcggtcagttgcatcacctggtccagggtcatggccttgccgcccagttgcgggaccacggcggcgccgttgttgtagaagaacgtccagaggcgattgggaaagggctgccaggtgatggtcttcggcgtcagcgtgccgtagccgctctccagcgggttgtaatagcccgagcgcggtgcatcgttgaggttggaccaggggttgccgatgatcgacatctgggtccagccggtgacgttgttgttccagtcggtctcgaaggtcggcaactggtcctccaggccgagcttgttgtagtccttgggcgcttgttcggcaggggaggtgaattgggtgaagggtgtgctcatgtcggttctccagcatgggtgttggtggagcagcaaccggcgtccggagcggggccggcagaggtttggcgtgggtcgtcccacaccagttcggcgataaagccaggcagcggcgcgtatgcatcggccgtcaacacctggccactatcggagtgggtcacgaccagcgataactgcgctgcgtcggtcggtttgagcttcagtacctgggcattgcgcgcagcattcagcgcccgcgacacgccctgggtgatgcagcggcccttgtcgtctaccaaccccatgccgatgcggctgaaacgcccgacgtaatgcgggttgtcggcgcgggcgtgctgcgccgtggcgtcgggttggttgaggaagacgtcgatcaggtaggtgtcatgggtgcagcgcacatggtcgaacaccacccagggacctgtgcctgcggcctgcggttgatggcagcacgcagcctgggccgcgccgaactgtggggcgacgggcgtgccgtagtcgtagccgatgtgccggctgtcctgggccatgtcgccgagggtggtgtagcgccaggcatcggcgctggtgaaggtcacgtcattggcctgctgcccggcgaacggctgcaacaggcattgggtggtgtactgcgccgccgggttgacacggatccagacctccagcatgcgatcgatattggcgtgataggaacagaacaccgggtcgaacgcggtgtaggcgttgtcggccatgtcgccgccgatccagccgtgatagttgtcgtggggctgctcgtagagcccgtcgaaattcaatgcgcggttggggtacagattgttcggttgcggtgggtcgaaactggtgatgttggcccacggatagcctggtacaccctggggctggctgaaggtggtgaacgccagcgcatcgaccacctgctgctggaagatccggctcatgccatacaactgggtgcgctcgaatcggaaggcctcgccctgggtgtagaacagcgggttgcgctgcacataccggcagtcgacgccctcgaccggcgcggtggcgcagaccttggagcaaccatccttggccgccgcataccgcaacgggttatgccgcacctcaccggtgtgcgggtgcacgtaggtttcatcgaggaacgcctgaggcaagccggcctgggggctgccgtcgatactggcgtctgcggccatccagtcccagtagggaatcgcgcagtcgatcaacgcttccaggtacagcaggtaagcgcggtgccacagggcgaacgcttcctggtagtgcaggcaccagttggtatggatgtaggcatagcgctgccagggtgagccgctgtcggcgtcgccaatgtgcatcacgtcatccagcttggcgcggtacaggttcagtgcttcggggctcagggcgcggatgtcctggcgcacacgcttgaccgggtgtggcagcgccggtggcgggatgcgctcggccgggtcgaacggcgaaatgctgtccagccgccagccctggttgacccacaggcggaaggtttccagggcatcgagcggccagaactgctgctgatcggtggtcagcggcatgttgcgcgaggccaggtgctggtagatggtttgcgaccaggtcttgaccgaggccgggtcttccaggaacacatcgtaggcgttcatgcagccgacccaggtggcggcgacggcggcgcgctggggggcgggtatccagtagggggcgctgaacagcgccttgatatcaccggtccatgtcggtttcgcgactatcataagatccctctcatgccgccttcaggccaggtgttggccgggctgctaagctggatcgatgttaactagccactgcgcaggatttgtgcaaattggcccgtctttgcgacgtattcattgcattttttcaaggacgatttggaaccgatgacagacgccatggatttgaagatcctgggcaagttgcagaaggattgcgaccagagcctggagttgttgagcgacagcgtggggctgtcttccaccagttgttatcggcggattcgccgcatggagagcgtagggatcatcaaggccaaggtggcggtgctggatgaacgcaaattggggatccaggtgacggcgtttttcctgatcaagctggacagggacagccaggatattgaccgcaagatgcagcacatcctgtcgactcatccggagattcaggattgttacttgatgaccggggagtttgattttgtgatggtggcgaagtttcgggatgctgtggagtacaccgagtatatctatcggtttctggagacttatcgggatattccgattcggacttattcttctacgttggtggttaggacggttaagaagtcttatgagttgccgttgcagggggttgggttttgttctcggagttgagtacatatccgtttcttcggtaacggctacttatggttccgctcttacagcggctcacttttggaaaggccggaatgccggcccagccaaaagtaagcaaaaggccttcgccccaacactcggtgcctcgcttaggctcggcatgccctcactccggcttgaatccgtgggccgccgcaatgggccatccatggcccagtgcggctaacccggcgtcctgccgggttacccacggattcaagcctgcgttcggccagcgtgtttgacggggcgatcccagatcaaaagcaagagcgcggcggccttagagccgaccggattgtatggccggtactcggtcaaagtgtgggagggggcttgcccccgatggcagtgggtcagtcactgatgagttggctgacacaccg

SEQ ID NO: 110 - DNA, 97901 bp, Pseudomonas nodulensis
  misc_feature (10666)..(10979): n is a, c, g, or t
agacacgcaactggaaccctatcgggacggtgtacctcaatcccgaaagggagctgacagttgtcgtgaaggtcgcctagcaagacgggagacacgacaactaccttgaaaaacgccgggggggtaaaccggcagggatgccggtttagccgccccgcgccatggatggcgcgtggcggcggcccccaaaatcactgtcggattacgggcacaccgagcctgggcgaggtgccgagtgttggggcaagagcgttttgcttacttttgcgcttttcaaaagtgagccgccgtaagggcggaaccataagccgccgttacctaaataacggatatgcccccgaaaaaaatgccccccacccaatcaaaaatgaagctttcatgacaaaagttcggtagcccatggccactcccgtctcctctgtgtaacgcgcttgagcccaccagaaaggtgagcttttcagccgcaagcaggatgccaggagtggggcgatgggaactatggaacgttactcgaaagtgggcatgcaggagctcgaccagcgcctgtcgaagatcgtcgaagcggcgcgcaagaagccggtgtcggtctatcgttatggcgcgccctgggtatggatcgtctcccaggaagactggcagggcgcccgcaaggaagtctcaagctacatcccggctggccattccctggtattgctgcgcccgcagatcgacgaagtgctcgaccagcaccgtgactggctcaccgccgaacccgcgatgtcgatccctgcgcagaccgtgctgcagatcctgctgctgcaactgctgtattcggtgcccagcgagcagcaactgcatgaacagctgaactacaacctgctgttccgctggttcgtcggcctggacctcaaccagaaggtctggagcgttcatgtcctgacgcgcgacatcgccacgctgctgaacaacccgcgtgcggtgcaactcatccagaaaatcatcggtgacgtgttttgtggcgccttgctgcacatgccggagttctccttgaacttcgccctgttgcacacctggctggcacgccacggcaacactgcgatcaccagcaattgagcaggccgcacgccggggattcggcgacggtgcgaacaatcagacagtcagggggcggtgtggagcatctgttcaaattaacgctggcgctgtgttgcgtgacgctggggagcctggcgcaaccggtgttggccgaggaagaggcggcggcgcgcaaggtcgacgtcaacgagtacttcgtgcgcggcaataccgtgctcgatgcggcgacgatcgaggaggcggtgtacccattcctggggccgcaaaagaccctgggcgatatcgaaggcgctcgcgatgcgttgcagaagatctaccaggcgcgtggctaccagtcagtgtttgtcgagctgccggagcagaaggtcgatgacggtatcgtctacctgcaagtgagcgaaaccaaggtcggccgcgtacgtgtggtcggggccaagcactattcaccggtggaaatccgcgagcaggtgccggccctggaggagggcgcagtgccggactttgccacggtgcaaacccagttggccggcctcaaccgcagcgccgggcgccaggtcacgccgctggtgcgcgaaggccagcgcccgggcacgatggatgtggatctgcaagtggaagaccagaatccctggcacgccagcctcggcctgaacaacgactacagcgccgacaccgagaagctgcgttcggtcgccacgctgggttacgacaacctctggcaactgggccacagcatttccctgacctatttcaccgcgccccaggacaccgacaacgccaaggtctggtccggttcctacagcgcgccattgaacgagcgctggaccttgcagttctccggttaccagtccgacagcaacatcgccaccatcggcggcagcaacgtgttgggcaagggccattcctacggcgtgtcggccatctacaacctgccggcggcgggaaattgggccaattcgttctcgttcggcgtcgacttcaaggacttcgacgagcagatgaaattcggctccagcagcgaccaggtgcccctcaagtacgcaccgttcaccctgggttacaacggctttcgctataccgaacaatcgcagctgggcctgggcctgaacctggtggtgggcacccgcgcgttctttggctacggcagcgatgccgaagagttcgactacaagcgctacaaggccagcgccagtttcgccgtgctcaagggcgacctgaattacacctacacctttgccaacgattggcagtcggcaaccaaaggcggcttccagctcgcgtcggggccgctggtctccaacgagcagtattccgccggcggcgccacctcggtgcgcggttacctggcggcggagcgtaccggggatgagggctacttgctttcccaggagctgcgcacgccgtccctggccaagttcctcggcagttatgtgcaggagtggcgcttctatgcgttcgccgaaggcgcgcgcatgcgcctgcacgacccgctgcccgagcaagaagacgaatacagcctggccagtgtcggcctgggcacccgcgccagtttgagcaaatggttgtccggcagcctggattggggctacccgctgctcgatggaccgaacacccagaaacaggactcgcgactgcacttcagtgtgcaggcgactttctgactttttcttccggagacttcacccatgcaacgcctattcctgagcctgttgatctgcctgggcttcgcgctcccggccaccgcccatgcctggtggcaggacgactggcactaccgcaaacagatttcggtagacaccaccgcccaaggcgccgcgatcagccaggccctgggccgcactgcactgctggtgcgcctgcacaccggcaacttcacttttgacggggtcaaggacgacggttctgacctgcgttttgtgagtgccgacgacaagaccgtgttcaaccaccagatcgaaagcttcgacccactgatgggcatggcgctgatctgggtcgatgtgcccaaggtcgaaggcggccagcgccaggacctgtggatgtactacggcaaccagaaggcaccggccacggccaatgggcaactgaccttcgacccgaactacaccgcgctgtatcactttgacggggccaatggcacaccagcccgggacaccacggcctacgccaacaccgcattgaacgccaccggcgcgagcatcgacggcgtgatcggccgcgccttgcagttgagcggccaagcgttgatgttgccggccagcccctcgttacagcacgcggcgggcggcgcgttcacgttcagcgcctggttgcgcctggaccaggccagcggcgagcaagcggtgctagcccgtcgcgacggcggccatagtctgttgctgggcctgaaccagggcgtgccgttcgtggaagtcgacggccagcgcgccgtgtccacccaaccgctgaaccccggtcaatggcaacacctggcgttcaccgccgagggcgacaagctcacgctgtatgtgaatggccgcgaaaccgcgaccctggcgcaggccttgccggcgttcaattctcagatcgccatcggcgccgacctgccggaagccggcagcacccacttgccattcgccggggccatcgatgagctgcgcctgtccaaggtggcacgcccggcagcactgttgctggccgatgccagcgcccagggcgccgagtcgaagctggtggcctacggcgtggatgaagaacagtccggctttggcttcggtagcctgggctttttgctcaacgccgtaccggtagatgcctgggtgatcatcctggtgctggtggcgatgatgttccagtcgtgggtcatcatgctgcgcaagaaccgccaggtcagccgcgtgagcagtgccaacgagatcttccgcgagcacttcgcgcagatcggcacccgcctggagatgtacgccgacgacgcacagttgggtgagcgcctggcccattcgtcgctgtggcgcctgtatctggtggcggtcaaggagatccgtacccgccgtgcccagggcgccgacacttcgtcggtgtcagccgccaccatcgaagccatccgttgctccatggacggtgtgcgtacccgcgagaaccaggccctcagctccaaactctcgaccctgtccaacgccatcgccggcggcccgtacatcggcctgctcggtacggtgctggggatcatggtggtgttcctcggcacggcgatggccggtgacgtcaacatcaacgccatcgcccctggcatggcggcggcgctgctggccacggccatgggcctgttcgtggcgatcccggcgctgtttggctacaaccgcctgatcacgcgcaacaaggaagtcagtgcggacatgcgcgtgttcgtcgacgagttcatcacccgcctggcggagatgcacggcgagagccagcacagtgaaaccgcgcaccgccgcgaacatcacgcatcggttccggcctgaggagaatcgccatggcttccgtaaatgcctcccacgacgatgacgatgacgcggccgtcgacagcatcaacatcacgcccctggtggacgtgctcatggtggtgttggtgatgtttatcctaaccgcgaccgcccaggtgtcgggcattcagattcacctgcccaaggccagcgcctcggtgtcgttgtcggaggccaagaccaaggccatttccgtgaatgacggcggccaggtgttcctcgacgcctacccggtgaccctcggcgagctggaagagcgcctgcgcatcgagaaagcgctgaacccggacttcccggtgatcgtgcgcggcgatgcgatggtgcagtaccagaaggtgatcgaagtgctcgacctgctgcgccggctggagctgtcccaggtcgggttggtcaccggcaaaccgagccagggctgagtcatgactgcacagatgccgatcaggccaccgcctgtgaaaaacacgccgccgtggcgcccgttgaagtggggcgccggccttttgctgggcgccgtcgccgcctggttcttgtggcagtgggccaatgacatgagcggcgtgcgccgtgaagcgccgaaggtgccgacgattatcccgttgccgccgccaccaccgccaccgccggaaaagcccaaggagcccgaaccccaggtcgaagaaaaagtcccggaaccggtgccgagccccgaacccgaggaggtcaaaccggccgaggaagcgccgccttcgcctaatgaagacttggccaacccgatgcagatcgatggcgacgcccagtccggcaatgacggtttcaacatcggtgccggcaagggcggcggtatggccggcagcggtggcggcgggttgggcaccggtacttataagcagtacctggccggcacctaccagcgcttgatgcgcgaagacccggagctgcgcaagaaggccttctcgatacagatagacctgtggttgggcgccgatggccaggtcaccaaggcgttggtggccaagtccagcggggatgccgagaccgatgctcagatgctcgccttgatccaggcgccgcgtgccacacagaaaccaccggcgtcgctgacgctacccatgcgcctgtccctcaagggccggcgcccggattgattgaatccttttttcaacggttttttacaggagttgcgtacacatgatctcccccgtgaatcgactgaccctggcggtcggcatggtcatcgcgaccctggtcggccaggcggctgcggccccggtcgcaccctcggaaaacgtcaccatcaacctgatccgcctgctggtgcagcagggcgtgctgacccaggacaccgccaacgggctgatcgcccaggccgaaaaagaagcccagcaggcgcgccaggccgccaatgccgcgccggtagtggccgcaggcccgaccgcagcccccggcgatgtgcgggtgcaatacgtgccgcaggcggtgaaggatcagattcgtgaccaggtcaaggccgaggtcatggccactgccaagcaggaaaactgggcccagcccaatacctttccggactggatctcgcgcatcagctttgacggcgacatccgtctgcgcgacgaatcgcgttacttctcgggcaacaacagcaacaacatcacggacttcgcgaaggtcaatgacaccggcccctatgacgtcaacaagaactccaacaccaagttcccacccttgctcaacacccgccaggaccgtgaaaacctgttccgcctgcgcgcccggctgggcatgaaagcggtgctctcgccggactggaccgccggtatccgcatcgccaccggctctgacaataacccggtgtccaccacccagaccctgggcggcggcttcggcaaaaaagatatctggctggaccagggctacctcacctggaccaccaccgactacatgaagttgaccgccgggcgtatcggcaacccgttctattccactgacatgatgtattccaacgacctcaacttcgacggtgtggccgccatcttcaatcactccctcaacagcgaatggggcgtgttcggcacgctcggcgccttcccgatcgaatacacctccgacaccgccagcgctaacggcatcgacaaggaagacagcgagaccaagtggctgtttggcgggcagattggcgcggactggaagatcaatcgcagcaaccgcctcaagctggccgcggcctattaccagttccaggacatcgaaggcgagcgctccagcccttgcgcgccttgggcgggtgcggcgggttgcgacacggacggcacgcgggtggcgttcatgcaaaaaggcaactcggtgttcaacctgcgcaacaacaccaccaacccggccgacccggcgaaaacgccggaccctcaattcgtcggcctggcgtccaagttcaatgtgctggacctcaacctggtctgggacagcgagttgccgagcgacttcaagttgcgctcccaggccaacttcatccacaacctggcctacgacaagggcgagatgctcaagcgcagcgaaggcgagatcgtcaacaacatcaacggcaagggccagtttgaaagtggcggcaatgcgctgatggtctcgttcaccctcggcagcgcgctggagatgcgcaagcgcggcgactggaacgtgctggccggctacaagtacatccagcccgacgccttgcccgacggcttcaacgattcctcgttccacctgggcggcaccaacgccaagggctacttcatcggcgccaactacggcatcgaaaagaacatctacgccagtgcgcgttggttgagcgcgtccgaagtctacggccagccgttcgaagtcgatgtgatgcaactggaactcaacacgcgcttttgatgcgcagggagatgccacatgaacacgcgaatctgcgggttgttactgctgctggtcgccactggcgcgtcggctgaaggcatggaggagcgcctgcgcacgcaactgcgcagcaccacccagcaattgcaggccctgcaaagcgagcaggcccaggccagcgccgcgcgcctggctgcggaaaaccaggccaagcaggcccaggcgcaaatcaagcaactgacggccgagctggacaaggcccgtggcgtggccgagcaaatggccggccagcaacagagcctgcacagccaggcgcaggcccaggtggctgccagcaacgagcagatcggcaagttcaagaaggcctatgacgaactgctggtgctggccaagggcaaagaggccgagcgggcgcgcttgcaggcccaactgagcgaacgtgacacacaagtgcagcaatgttcagtcaagaatcaacagatgtacggcgtagcccagcagttgctcgcggcctacgaaaaaattgacgtggccgaggtgatgagcatccgccagccgttcgccagcagcgcccgggtcaagttcgaggagctggcccaaggctttggcgacgatttgtacaagagccgtttcgatgcgccccaggcaactgccaatcattgatagacagggaagagatctccatgagcgaattgatcaccagcgtcaccacccagagcctcaccgagttgctgcaggaagccggttaccgggtcaaccagactgagcaaaacggcatcgtgcaattgctcagcgccagccagggcatcggctttgcggtgcgtttcggcaacccggcggcagagcagggcgcctatgtggatttcacttacagctgcgcgctgcggatccagggcgaattgcccgaaggtctggcccaggtatggaacgcctcacgccgttttgcacggttgtcggtgcagggtgaattcctgctgatggaaatggacgtggtggtggccggtgtcggcgctacgcacctgcgcagccagttggagttgtgggaccgtctgttgcaggaatttatcgtctacctgcgtgagtacagccaacaggccgcgcagttgcaggcggaagccgaggcgccggtactgtgaaaaagccaaccctgatggtcggagcgggcgcgctggccttgctggtggtggcggtgggcttgagcctgcgaccgggcagcgacccggtggcggcacagcaaccggcgccggtgacccaccctgtaccggtcggaccggcggtggcccgcttgggtaaccagcagatcgacctgacggaactgaaaaccgtgctggccagcctgcctgccgaatcccgcgagcaattgcgtggcaaccgtggcgcgttggaaacctggattcgctcacgtctggcgcaaaaggccgtgctcgaacaggccgacgcccagggctggcgtcagcgcccggacgtggagcagcaaacccgcgccgccgccgagcagattgtatttcgcgattacatgttgtcggtcagccaggtgccggccgattaccccagcgccgccgaattgcagcaggcctacgacagcggcaagtcgcagtgggtgacaccgccgttgtaccgagtgagccagattttcctcgcggtgaatgacccgcaagccgtcgacagtgtacgccgccaggcccaggagctgagccgtcgcgcccaggccgcaccgaatgatttcgccgccctggctacgcagttttcccaggacaccgactccgccgcacgcggcggtgactcgggcatgcagccgttgcagcaactggtgccggaagtgcgcagtgcggtgtcgcgcctcaaggtcggtgccgtgtcggacgtggtgcagagtgcagcggggttccatgtgctcaaactcaccggccagcaaccggcgcgcaccgcgaccctcgacgaactgcgtgaacgcctcacccaggccctgcgtgcccagcgccaggaacagatcgccaaggcttacctcgaaggcatgctcaataccgccaccctgagtatcgacggcgccgagctgaacaaagtgctggagtaacacgcgtcaacccgcattggatgcacagaccaacaagacagggagtctcccatggcatttctagaaccgtctgccccccaggggccctccgtttatcgcgtgtcaaccgagggccgcagcagttggctgaccctggcccatgagatcgacccggaagtggcgcgctacttcctggtgagtgcgcgctgcggttgtttcatgcaggcggcgcgcagtttgaatatcaaggcgacgctgttgcgcaagcgtctggcgcagttggaggaacacctgcggcattcgctgttcagctaccagggcaacggtttggtgctcagtcgcgatggccagcagttgcaagcgcagctgattgcactggcccatgaacgacgcttgccggtgacggagcagccgttgattcggctcgcggtggctgagccgatcctgcatgacatccttgggcgtgacttgatcgccttgctgcgccgcaatgccagcgtgcgcctggagatcatctccatcgacagccagttgtcgttgcaggcggtggatgtggacgtggtgctgtggctgtcggacgccgacgggccggtgcccggtccgagctttgccactgaaccgcctagggccctggcgcgtttgcagtatctgccgcatatcgccaagcgttattcgcggttgaccacacggccggacagtgtggaggacctcgacgattacatgctggtgcaatggcagccggatgcgcaggtgggggctttgcaggcgtggaaccaggtggtgcagcagcgcctggcggcagtggtgcaggtgcatgcgtattcgctgatgctggagatgatccgttgtggcgcgtgcattgggttgctgccgcattacatgagcagtttcgaccgggggctggtggcgttgccggggttgctggatgagcgtatgcagcgccaggtgtggttggcggtgaatgcgcaggtgcggaatgaggaggcggtgcggatgattgtggaactgatcgtcggaacgtttgagggacggcgggagtggtttgattgatagatttatcctcggccagcaaatccccctgtggcgagcgggcttgccccgcgttgggctgcgtagcagccccagtgaaggcaccgaggtattcctgaaagaactcagcgtcgggttttggggctgctgnnnnnnnnnnnnnnnnnnnnnnnnnnnnnnnnnnnnnnnnnnnnnnnnnnnnnnnnnnnnnnnnnnnnnnnnnnnnnnnnnnnnnnnnnnnnnnnnnnnnnnnnnnnnnnnnnnnnnnnnnnnnnnnnnnnnnnnnnnnnnnnnnnnnnnnnnnnnnnnnnnnnnnnnnnnnnnnnnnnnnnnnnnnnnnnnnnnnnnnnnnnnnnnnnnnnnnnnnnnnnnnnnnnnnnnnnnnnnnnnnnnnnnnnnnnnnnnnnnnnnnnnnnnnnnnnnnnnnnnnnnnnnnnnnnnnnnnnnnnnnnnnnnnnnnnnnnggtgaatgcgcaggtgcggaatgaggaggcggtgcggatgattgtggaactgatcgtcggaacgtttgagggacggcgggagtggtttgattgatagatttatcctcggccagcaaatccccctgtggcgagcgggcttgccccgcgttgggctgcgtagcagccccagtgaaggcaccgaggtattcctgaaagaactcagcgtcgagttttggggctgctgcgcagcccagcgcggggcaagcccgctcgccacaaagaacagttgtcaccgatgcaccgcggcgtgcgtatcgcaggcaagctctcacaagaaaagcagactgacggtcgccggcgttgcgcggctgggataagtgcgccagtcttggtggcctcattccctgggtctaagcacgctgcgatgcaagccacacgcctgacactcatttgccatgccctcacgcccctgcaaaaacaggggcgtttctgcgatgacgagccggtggcgatcgattggcagggcgcggccggctccctcgccgggcgttacaggaaaacgccgcgtttactctgcgctcctgagctgcgtactcggcagacggctggcttgttcggcaatgacgctgtgatcgaagacgccctgcgcgacgccgacttcggccagtggaaaggccagcccatcagccaactcaatagtgatgagttgaatacctggctcaccgacagcaccttcgcgcccccgggtggggagtcagtcgatgacgtgtgtgcacgcgtagcgcagtggctgaaaaccctcgaatcccaacccggccatattgtcgccatcacccacccctttgtgatccgcgccgcgctgttgcaggtgatgcagtttccgctgtcgatgttctaccgcatcgacgtcgaaccgttggccgccaccgaactgcgcttcaacaccgtctggcgcctgcgcctggaaactcacgcctgagcgcctgaacatggcagaatccacgccccgcactgagagcaacccatgaaacgcatcctgatcatcggcattggcgccggcaaccctgactacatcacgatgcaggccgtgaaggcgctcaaccgtaccgacgtgtttttcctgatggacaagggccagagcaaagacaagttgatcgacctgcgccgcgagatctgcgagacctacatcactgagccgggctatcgcttcgtggaggccgagtgccccgagcgtgtgcgcggcgatatcgactacaccaccgccgtgcgggacctgaaccgcgacaagcagcagaccttcgagcgcatgatcaacgaagaaatggctgacggtgaagtaggtgctttcctggcgtggggcgacccggcgttgtacgacagcaccatccgcattttgcaagcgattctggccagtggccgctgcaccttcgagttcgaggtaatccccggtatcaccagcgtgcaggccctggctgcacagcacaaagtggcgctgaaccgcatcggcaagtcggtcgagatcaccaccgggcgccgtctggcggcggggcaggcgagcgatgccgacaccctggtggtgatgctcgacgcggaagactcctaccgcaccgtggccgatcagggcctggacatctactggggcgcctacctgggcacgccggatgagatccttatcagaggcaaggtcagtgaagtggcagaagaaatcgaacgggtgcgcaaggcggcgcgtctggagaatggctggatcatggacacttatctgctgcgtaaaccctgaggtcacgtcccatgctcaaactgtttgccctggcactgaccctggtggttggcgtcgctcatgccgacgatacactgcacactgacttgccgttgtcgtacctggaacagacccagggcgatgcgcgcaaccagccgctggtgattttcctgcacggtttcggcagtgacgaagaggatttgttcggcatcaaggacgcgctgccgtcgacctggacttacctgtcggcccgcgcgccgatgccggtggacccgcatggctatcgctggtttgccaggaagcccggtgatggcgattacgatggcgagactgccgacctgcaacgcagcgcccggttgatcgaagagtttgtcggtaaagccaccgccaagtaccacacccagccggatcgggtgttcctggtgggcttcagtcagggcgcgatcatggcctacgaggtcgggttgcgccgcccggatctgctgcgtgggattgcggccttgagtggcagcgtgctgccggtactcaaggctgagctgaagccggatgtgtcactgggcaaactggcgattttcattggccacggcaccttggaccaggcgctgccttatgcctcggccactcgggcgaatgaggtgttgacgggactggggttgaagccggagttccacgggtatccgggcatgccgcataccatcagtgaaacggaagtgcaggacctgaaagcctggctggaaaagagcctgaattaaacgcggtcaaacattgtgggagggggtttgttccctcccacacttggatcgggttgtctggaagactgttatttcccgccggtaatctgcttcaccagcgccgcgtgccccttcgcatcatccgcgcgcgagattgcctggatcaccagcaggtgattgcccgaaccgcctaggaacgtggagttcagcgtcttgccgccgccctgggtggcggtgctgtccacttggcgcaggcccaggcccttgaaggtcagcttcttctcgctctgtttcttgaagtccggcagggcggcgctctggtccttgacgaagccggccacggcaccatccaggaatttggtgtcgttatccccaatggtcagcccatcgttgcgcacggtttcggcgacgatgactacacttttcgtggtctggttggcgtacatcgtgccttgggtgtcggcagtgccatcctcggccttgccggccggcagggtgtcggcggcgtaggccttgggcaagttaaaggtgaacttgccgcccaaggtggagatggtttgggtggtcggcttggacgcggcgaacacgctgccggcggtcagcgcgagggccagcaggacggcggtcttggtgaaagtggccatgaagcgctccagggatgaacgagattgcggcgtattctgtcagaaaaatcgcaatctcgttcactggcagcctcacaccttgtcggactcttcctccagccgatccatctcaaacagccgcgccagttctgcccgtgcttcctgggcggtttgcatcaccttggccgcgtcgtcgtacaccgcgtgttgcgcggccagcacttgcaggtcgtggttcttgaagcgggtgatgcgcgcgtcggcctgggcctggctcaagccgaggcccaccagggtacggcggctcatttccaggctggaatagaaggtctcgcgcaccggcgaggcgtccaggtcgaccaagcggtgcacgtgctggcggttacgcgcgcgggcgatgatctgcatgtgcgggtagaggttgcgcaccagttcggcggtcttgatgttgatttccgggtcgtccatggcgatcacgaagaattccgcctggtcgaccttggccgcgtgcaggatctcggggcgttgcgggtcgccgtagaacaccggcatgccgccgaagctgcgggtcagctcgatggtttccaccgaggtgtccagggcgatgaacgagatgttctgtgcacgcaggattcgcgccacgatctggcccatacggcccatgccggcgatcaccacgcgtggcgcatcgctttcgatggtgcggtattcctcgggcacttccaccggcttgaccttgggcttgaacagcttcgggcacaccagcagcaatagcggcgtcaccgccatggacagggtgatggtcagcaccagtatgtcgtagaggtgcggttcgaacaggccctggtcgcggccgatcttgaacaccacgaaggcaaactcaccgccggccgccagcaccacgcccaggcgcagggcgctttcgcgattgaggtcacccaccatgcggcccacggcatacagcagcggcaatttcaggcctatcaacagcagcgtcaggccaatcaccaccagcggcgagctgagcaacaggctgaggttggcgcccatgcccacgctgatgaagaacaaccccagcagcaggcccttgaacggctcgatctgggattccagttcgtggcggtactccgagtctgccagcagcaggccggcgaggaaggcgccgagagccatggacacgcccaccaattccatcaaccacgccgtgccaatcactaccagcagcgcagtggcagtggacacttcacgcagcccggtcttggccacgatgcgaaacaccggccgcaacagatagcgtccgccgatgatcaccacggcgatgctgccgaggatctgcaacacatgctgcaggccctgggcttcggtggtcgggtgatcgctgccggccagcagcggcaccatggcgatcagcgggatcgcggcgatgtcctggaacagcaggatggcaaaggccaggcgcccgtggggctggttcagctccttgcgctcggccaggctttgcaggccgaaggcggtggacgacagcgccagacccaggcccagcacgatggcgctgttccacgactggccaaacagccacaacgccaccacgcccatcaccaggccggtcagcagcacctgcgccaggccgacgccgaacaccgccttgcgcatcacccatagacgcttgggtgacagttccaggccgatgatgaacagcagcaacaccacccccagctcggagaactgcgcgacgctttgcgggttgccgatcaggcccagcaccgacgggccgatgattacaccggcaaacagatagcccagcaccgcgcccagttgcaggcgtttggccagcggcacggtcagcacggcggcgagcaggaacaccacggctgcttgtaacaggttgccttcatggggcattgcgaactccaggatctttaaaaccaatcaacaggcgggtattagagcgctttttacatttcgataattgtgtttttgcggcgtaggagggggatagcgcagtgtttttcaagggcgcgagctttctgccggtgcagtggaaggatgtacaaacaatttcccaagcgccgcaggtggaaggccgggcacttcgcctcctaatttttatgctcttgagtttatattccatgggtggcatatttcatgagctgggacgttgaatacacggatgaattcggagactggtgggaggatttgggagcaaaggaacaagtttccgtatccgctagcgttgatctgctggtgcttttaggtccgggcctgggctttccccacagcagcgctatcaagggctcccggcatggcaacctgcgggaactgcgcatacaacacgccggtcggccgtttcgtgtgttgtatgcctttgatccacgccgatgtgcgttgttgctgatcggtggagacaagacaggacaacatcggtggtatgaggaacacgtcccgatggcagaaaagctatatgacgtgcatttggaaacaatgcgtaaagagggccgtaaccatggctaagaaattcgctgagcttcaagcgggcatgacgtcacaagcccgcgccgaagccaagcagttgttccagcaacacatgcaggaaatgccgctgcatgagctgcgcaaagcccagcagttgagccagcagagcctggcgaaggcgttgaatatcaaccaggcggccgtctccaagatggagcgccgcacagacatgtacatcagcacgttgcgtgactacatccgtgcgatggggggcgaactggaaatcatcgcaaccttccccgatggccaggtcaagatcgataatttcacttattgaaagcattgcaaacgcccggcgcgtgccgggctttgttttatccggctatttatcgctttgcatgaccgcaccttgcccgaccggtgcgaggttcaccggccggcgatacaagcccaccgccagcccggcgatgatgatcccgatcgagatcaggttcggcgtggaaatacgctcatccaggatcagcatcgaactggtaatgccgaacaccggaatcagcaacgacagcggcgccacggtggacaccgggtacaacttgagcagcgagttccagccccagtaggcgaagtgcgtggccaggtacacctggaacagtatcgacaggatcgccgtcaggtcgagactgctttgcaaaccttcgaacgcggcgctgccgtgcagcagccaggcggtgaggaacagcgggatcggcgggatcaggctggcccagaccatgaacgagaagatctccttgacccctgatttcttgatgatcacgttgcctacgctccaggccaccgcactgaggacgatcagcatgacgcccagcaccgcgtggttgccttcctgggtggagatgatcccggccaggccgatcaaagccagcacggcgccgatcatctgcgcgccacggattttctctttgaacagcacaaagccccagcccatggtgaagaacacgctgagttgaatgatcagcgaagcaatacccgggctcacgcccacctggatgccgtagttgatcacgccccacatgcccagcccgaagataaaaccgtaggcggccacgtagctgaacttgacggccgggcgcttgataaagaacaccagtggcaaggcggccagggcgaaacggattcccgtgagcacaaatgggtcgatggcacgcaggcccagcttggtgatggggaagttgaccccccagaccagggtgacgagcacggcgagtgacaaatgttttttcagcatggaccctccttgggtcaggcggcacagcgcagttgcaatgtgccgccgggaagtcagttcaaggcgaaccgtttttgcgtcaggcgcagcccggcatttccggataccccttcgaacgaaccaaacttgggcagaggcgattttaggtggcagatgattggcccgcttgctatgtcaggtcatactttgacaaaatcgggccatgtcgccgaccttcaccttatccccttacgaactcgatagccctgctgcggtggtgacgctgcgcgagtacccgtccggcacggtgttcccacgccacacccaccggcgcgggcagttcgcctacgcatccaccggcgcgttgaagatgttcacggagctgggcaattgggtggtgccgccgcagcgggcgatctgggtaccgggcggggtggcgcacgagatgcacatgcgcggcgatgtggtgatgctcaatacctacctggacgatgacgcggcccgacgtgcagggttgcaggaccattgccaggtgtttgctgtatcgccgttattgcgccacctgttggaagcggcgctggcgattgggccatcggcttcgcccagcgtccgtgattgctgcgtgctgaccctgttgatcgacgaaatcggtgccatgcccgagttgccactcagtgcgccgttgccgtccgaggcgcgcctggcccgttcgtgtcaacgcttcctggaggcgcccacgcagaacatttccatcggtgagatggccgactggtcgggcatgagtcggcgtacctttacccgtcacttccgcgagtgcacgggcatgacctttgtttcgtggcgccagcaggtatgcctgctggaggccacggcacggctcagtcatggctcgtccatcaccgatgtggcattcgaattggggttcagcagttccagcgcgtttacgtcggtgttccggcgtaacctgggcgactcaccggcgcgctacctggccaagtccaaggcagcttccctgttctgaacggaggaggcggcgaccctggtgcctttttcccagcggtacggcgttgagcctcgccctttgttactatcgccgtcccttgtcgccaggagtcacggccccatgcagcaccagtgggatgaaatgcaccgcacccgcaagcccacgttcgtactgtgcggcgagcctcagggcgacgtgctcaatctctatgttcacggttattcggcgttcttcaaccggcaacaactgggcaacttcaaggcgcagttggcgagtatcgaaggttcgaccaacctgatgctgttctggccggcggggcatttcctggaaaacctgtttgcgcctttcaaggaggtgatcggcgcgatgctgggcggcggtagcctgggcgcggcaaccgtcggggtgggcaaggcgcttgcctattttcttgatcactacaaaagcgtcgaggcgcgggtggacgaagtcgccaaaagcctgctgccggaactggccaattacctgcacggtgaatcccttgatgtgcggcgtatcaacctgatcgggcattccctgggcgcgcggatcctggtcaagagcctgctcgccagccccgaaaccgcgcgggagctacccttggacaacctgctgttgatgggcggcgcgatctgtacgtcgagcccttgggatgtcgtgtcggcgccgctcaaggggcgggtaatcaactgtcactccagcaaggactgggccttggccataaagccggacaccgaacgctgcatcggtcgttatgcgatcccggtgacgccggccctcaaggccaaggtcaccaacgtgcacctggcgactttcgatcacgccgcctattggccgcaattgcagacggtggtgcagtacaccgacctgctgcatgaacggcgtggcatgatccgctccgaccagcgcagtgctgaagtgcgttttgccgaggaggacatcgatttgttccctgcgctgatgcaggcccggccggaagaggtgaagttcctcgccgaattgatggcgcaaaaacgcagtgcatcgatagacgccacggtgcgcgagccgctcaagttggctattgagctgcaacgcatgggcggcgataccttcatgaacctggcccgtggacatggcgtgggttatcgccagatcgccgaagatgtggtgcagcggctggggatcaagttcgacgagccgctggatacggtcgcactggccgatctcgaagcccgggtcgccgagaaactcatcgaacagtacaaggacaaactcagcaacacggaccgacaggtgttcgacgcagaactcaaagcggccgctcaaaaggagcagggcttgttcagccgttttgacgtaggccggtcggccaccaccgcgttgagcggcacggcgttggccgggctcaccggttttatcctgcgccgtggcgcggctacggcaatcccggtggtgggccaggcgttggcggcggcgatgctggtggtgagcggcgtgcgtgcattttccggcccggcgtattcgatcaccacgttggccgtgctggtgatcggcgtgattcgccagcgcatggagcgtgaagcgctgaaccaggagatggacctggtggtgcaggtggtggaggcgttcgacctgccacgggacacggtgatgcgcacggtcgtgtctgactgataagctgcacccttgtcttgtgtgtgcctgggataccgcgtgaaattcagcctgccgaaaattgctaccgccccgttctgcccgccggaagtggccggctccgtcgccgtggaccccaaggcttcgttcttcaagcgcatgttgatgttcgccggccctggcctgctggtctccatcggctatatggacccgggcaattgggctacggccatcgaggccggttcgcgctatggctacagcctgttgtttgtggtgttgctggccagccttgccgggatggcggtgcagtgcctgtgctcgcggctgggcatcgccaccggcaaagacctggcgcagctgtgccgagagcgttacagcacgcgttctgcacgcacccagtgggtgttggcggaaatctccatcatcgccaccgaccttgccgaagtgctgggctgtgccctggcatttcatttgctgttgggggtatcgctgaccactggcattgtgatcaccgcctttgacacgctgttggtcctggccctgcagaatcgtggtttccggcgcctggaagcgatcatgctggcgctggtggcgaccatcggcgtgtgtttcttcatcgagctggtgctgatcaaaccttattggcccgacgtgttcagtggtttcactccgtcactttccgcgatcagcgacgccgcgccgctttacctggccatcggtatcctcggggccacggtgatgccccataacctctacttgcacagctccatcgtgcaaacccgtctgatcggcaaggacctcgccagcaaactggacgcggtcaagctggcgcgcatcgacaccatcggttcattggccctggcgctgctggtcaacgcggcgatcctgattctcgccgccgctgctttccacaagaccggccatactgaggtggtcgagatccaggacgcctaccatctgcttgacccgctggtgggcggtgccttcgccagcatcctgttcggcattgcgctgttggcctccgggcaaagctccacctttaccggcaccatcgccgggcaggtgatcatggagggctacctcaacctgcgtattccctgctggcaacgccgcctgatcacgcgtgggctggcgctgattccggcgtttctgggggtgtggctgatgggcgacgatgccatcggcaagctgctgatcctcagccaggtggtgctcagcctgcagttgccgtttgcgctgtatccgttgatccgcatgaccggcgataaacagctgatggggccattcgtgaatcggctgccgacgcgcttgttggcgtggtttctgtttgcgctgatcagtggggcgaatgcctggttgattgggcagtgggtgttcgcttgaggcggtacagcgttctagatgagttagaccagaatcgccaaggacgtgtattgggcgatgtgtggatcggccgtcaatagcctcatgggttcgcttatggctgtcgcaataatgagccgatcaaaagggtccttgtgatgctgctcgagatccttgactgcgatggcatgttccgaggtgacgggcagttcggcaaatccgctttccaggcagtactcacggatttcctccaagtctacggtgagtttccccaggccgaccttgattgccatttcccagaatgtcgcagcgctgatgtaaacctccgctgcattctctatcagcttcctggctttgctggatagcctggggtcttccgtcagggtccagagcaggatgtgggtgtctaacagcactctcacggatgcttgccttcgaaggcatccagcagggcgccaggcaggggtgcgtcgaagtcttcgggaatgacgaacttgcctttcatggcaccgattctccggcttttgcatttccccacgggcacaagttgtgccatcgcacgtccatgcttggcaatggtgatgaccttgccagcagcggcctcatccaccagttttgacagattgtttttcgcttcgcccaaaggaaccgtgatcatgtggttatccccatattttggccaaatatagccaaaactgggtgcgctatcaaagacggccagaccgctggcggacgcggcgcgctcagatcgcgatggtttgtgatacgtgactttcatggcagttctctaaaagaggatgttgcgcaagtctgccgtaataggcttggccacaagaatactggcccgaaaaaacagaatggaactacttcctgctgtaggaaaactcccgaaccacttggttcaccgatcccaatacggcacggccccaaaacactccacaaaataatcaatcaccgtccgcaccttcagcgacaggcgccggctgcctggccacagtgccgcaatctgctgcggctccagggttgtcgccacttcatagtcggtcagcaccgcctgcaacgtgcctgcgcgcaagccttcgccgatcaaccaggagggaaacaccaccagccccaggccttgctcggcggcatgggtcaaggtgtcggcatggttgccggtgatcggacccttgacgctgtagggcgtccagtcgccctggcccttgcggaaaaaccagcgttgctggccggtgatgcctttgtaggccaggcattggtggtcgatcagttcgtcgggatgttgcggcgtgccatgccgggccaggtaggcggggctggcggcgatgcgaaagcgttggggcgcgaagatgcgagcctgcatgctggaatcgttgagcacgccgatgcggaacagcaggtcagtgccgtcctgcagtggatcgacgtacgtgtcggtctgctggatgtccagttgcagcttcggataccgtcggcacaactcacccagccacggcgacaggtggcgctggccgaacaccatgggggcattgatgcgcaccaggccgctgggttcgctttcctgttcctgcaatgcctggctggcggcttcgagttgttccagcatcaaccgcgcatgccgccccagcagacgaccggcttcggtggggctgaccgcgcgggtgtgacggtagagcaactgttggccgagggcctgttccatcagctgtatttgtcgggagatggaggagggcgccaggccttcgcggcgggccacttcggagaagctgcccaggtccagcacggccacgaacaggcgcagtgccttgaaactcaattcattcaagccttgcatcatgcctccaggctgtgcgtttttcgcaaaggtgttgtcagcatgctcccatttatcgcacaggacggccaccggataatgcgcgccatgtttcctttcttgaagtgcaggtgttgtatgcaggcaagttctatcgagggtgtggcgcaagccaaaccgaaaaaaaatggcttgaggttgctgttgttgccgctggtgatcctggccggcatgggcctgtcggtagaggccggtttgctcggcccgctaggtgtgcaggtggggcatttgtgggcgaccctgagcattttcggggtgggctcggcgatcctgtatctgctgctgttgttcagtggccagcaaaagggcccggcgctctccgaactgccgcgctggcagttgatcggcgggttcctggggccgatctatgtggtggtgctcaccctggccacgccacatatcggtattgcgatgaccatgatcgcgattttgtccgggcaagtcggcaagagtgtgctgatcgaccatttcggctggttcggcgcggcgcgcaagcgggtcaatggcgaacgctggattgccctggcgttgattgtggtggcacttgttctgattgcacgaggttaaggcgatgaatctgattctgttactggtcgtggtggttgccgcaggtgcggtgttgagcgtgcaggcggcgatcaacggtcgcctgggccaggcggttggggtattgcgtggcagcctggtgaccttctcggtgggggcgattgtcaccgcgttaatgattttcttctttgaacccgtccagacggtgagcctgctggacgtgccgaaatggcaactgaccggtgcgttgttcggtgtggtgtacatgatggtgatggtcggcgcggtgccggtggtcgggacggccgtcgccaccgtcgcggtgatcgtcgggcaattgggcatgggcatgctgatcgacaacttcggctggctgggcaacccggccatcgagctgtcgagcagccgcatcgtggcgatggcctgcctggcgttggcgctggtgttcatgtaccgcagcaatacccgcaccgactgaggggttgaaccatcgacggcgggccgcagtcactgcttaaggtgccggcgcccgccgcaccgagacgaccatgaagaaggagtctgaccatgccagataaaacctgtgcctgcccacactgcaaatgcgtgctgggacctgatgcggtcatgaaggacggcaagggctattgctgtcagggctgtgccgagcaccatgcccatggtgagccgtgtgcggctgcgacggggtgtgagtgtgccaagtctgccagaggctagcggtgtttgaaccggtgggagcctgcgtgctcccacacggtttaccggccgcaaaaatcactcggattgtcgtgccgcggtgattaccatagcgactctccctcgaatgatgtgcaccccatggccctggccgcgccgcctgacctcagtgatcctgccgttcccgtgcaacccctggcgcgcacctatccgcgcgggctctacgttgagccccacagccacgactggggccagttgctctatgccatgagcggcgtgatgtgggtcgagaccccgcaggaagcgctggtggtgccgccacagcgtgccgtgtggctgccgcccggcgtagagcatggtatccgcgtggtctcggacttgcagatgcgcaatatctacctgcgcccggccctggccgcaacgctggacagccaggtgcaggtgatcgaagtcggtgggttgttgcgcgagttgatcgtcacgttggtggacgagggcgacaacggtgaggtggcgtactacgacgcgctggtcagcctggccttgctggagctgcaacgggcgcgccgctcgccgattcgcatcgccatgccggtggaggccgaccgccggctgatcaacgcctgccaggcggtcatggctgcgccgtcactggagatccctttcgagcagcatgccgaaaccgccggtgccagcgtgcgcaccctggcgcggttgttccagaaccacctgggcatgggttttgccgaatggcgccgccaggtgcaactggccacggcggtggcggagttgatccagggccagtcggtcagcgccatcgcgcgttccctggggtattcgcccagcagtttcagcgacatgttccggcgtgaactcggtgtggcgccatcgcaatacctgggctgaggggttggccgatagcctgaagcacttggccgatgcttcaggcatgcgctctctacactgagcgcatccacccacaaggcgctgccccatgaactacctcatttcccttgccatcggcctgtttgtcggcgtgatctacggcgcactcgacttccgctcgcccgcgccgccggccatcgccctggttggtctgatgggcatgttactgggcgaaaagctctggcccatggggcggcaactggtgggcacctggttctcctgatctctttttatttgatggatattggccatgaaagcactgcaatttactgccaccggcgacctcaacaccctgcgctttgtcgacgtcgccaccccggtgccggccgtgggggaagtgctggtacagatcaaggccgcgggcctcaaccccagcgacgtcaaaaacgtgctcggtcgtttcccctacaccaccttgccgcgcatccccggccgtgatttcgccggggttgtggttgaaggttcgcaggcgctggtgggccaggaagtctggggcaccggccgtgacttgggcttttttgccgacggttcccatgcccagtacctcaccgtgtcggccaagggcgtggcacataagcctacccacctgagtttcgcccaggccgcgagccttggcgtgccgtacaccaccgcctgggatgcactggagcgcagcggcgtgacccacggcacacgcctgctggtgatcggtgccaatggcgcggtgggcagcgcggccctggccctggcaaaaatccgtggtgcccaggtgctggccgccgtgcgtcgcccggaacaggtcgacgtcttgcagggccagggcttcgacgcgattgccctgggcaagccggaagagctgggcacgcaggtcaacgccgtgttcaagggcggtgcggatgtgatcttcgacaccaccggcttctggctgccggccgccgtggcaggcctggcgcccttcggccgcatcgccattatcgccgcgccggtggacggccatgtacaactgccggccctggcgttgtaccgcaagggtggttcggtggtggggatcaattcgttgctctacaactgcgagcagtgcgccgtgatgctggagcagttcgggcggttctttgacgaaggcttgttgccgttgcccaccggcctgcgtgaagtggcgctggccgatgggctgcagtgcttcgaagaggtgaaccagggcagcgcagacaagatcatcttcctgccttgatcctggcggtcatgcctcgggaacgcctttctcccaggctgaccagttcttgaggattgcctgtaccaatgggttgcccgtgcggtacaggttctccagcgccgggacaaaaccgccctggtccgcgtacttcaacaggttatccacttcgctgtagcccgggtacggccggtcgaaatccgaaccggcgcgcaccaccgccaggcgctggatgtccaccaagccttcgcggctggcgcgcaacagggcctcataggtggagttgtcttcctgctgggtggtgcagtactcgcctttgttgtcggtcagcagcttggtccacacctcggcgcgctcgctcaagcgtgtgccggaaaaccaggtgttgcccgccagggtgtcgcagcgggtgacttgcggcggctggttggccggcgcggcggggtagtgtttgcgccaggcgctggattccttgctttccgtcagctcgactttctgcgacagggcaaacgccttggcctgcaacttggggttcagctcaaacacttcggtcttgtagtccagcggtggtttttcgttggggcccttggtgttgatgcccagatagccggtcggccaatccttcggcgcatcccgcgaatccagctcccactgggtgccgaattccaccaggtaatgtgcccacgcggcggtgccgatcgtgccgtgcttggggctgataccggcgatcccggcgatcaggaagtagctctggcgcaggtcgaacttgggcgacagcgccaaggccagggtggaggccgcggcgttggtctggcccatgccggtgaccagcaggcaaacatcctgggtattgcagcggatcaccggatactcggcagacaagcccggtacgcgcacttcctgcttgagttccaggcggtcgatccaggtttgcgcctcgggggcgaacatggtgatcagcatcaccttgggcttgatcggtgcgggtgcgtcggccagcaccacttgaggcagaacggccaggccaacagccattgaaagacgggtaaacgcgttcatctaaagctccttgatcagaattgatagcccacgccggcgtagtaaccccagccgtccgagcgggcgcggaaattaccttcaccgaaattcaactcgctgccgtcttcccagttgccgccgttatgaaagtaacggccgaccagggtgaaacgcaggtgggtgaacgaatacagcagcacgttggtggccaccagggaattggccgtgcgtgccgggttgtccttgtgcaggtccgagccaaaatcgtagttggtaaagccgatgtaggtcagcgaagcgccgttatcgaatttgccgatgggcacgatgtacttcatttgcgcacggtagccgtcccaggaatattcgttgctggcgccatagttttcccactggtaacgcccgtagaagttggccgacaggttgacccgcgagtgggtgtcgatatcggtgcccaggccgctgtacagcgtatttgcgcggttggccttgttgctgccgtggtcgtagatccagtcgaaggccacataccattccttgaacggcccgatggccaggctgcggcccgccaggtagtcgatggaaatacgcggctcatgttccatgaacaccggcgagccatggtcccacacgcccttgtcattactgttaccgatggtgaggatcttcggcacgtcgatatagccgtacagctcgaaaggccccttgcggccgaagtactcgtactccagatagacgtcatcctgcggcttggggccgaagctgatgtctttgctgccgatcaacgtcaggtcctgattgaaccagtccgacaggtacacaccttttttcgccgggctggcttcagggctgagggtttcgccctgtgctgagtcatcgatgggtttttcctgcgccaaaaggggcgcgctgagtagtcctgtaacggcagccagtagcaaggaaacaccaaaggaggtaggacgccttgaggtgaagtgcattgaaaatccctattcgtacgcggtttgaacccgattcttcgggtggaggtgaacttggttgccaagttcgtaccgcaaacgtttgcacaggctgtaccaactttgctcaatcgattgatcagcttggaaaaaaactaaattagtcgaccttttggtcaaaattgactgggtgtcatttttcaaggcgttggaacaggtgcatcgcggtttcccgccgatagtcactcggcgtttggttcatctcgatgcgaaagtgccggttgaaattggacaggttggcgtagcccacttcaaagcagatgtctgccaccgacatatcgctttgcagcaacaaccggcaggcgcgctgcacccggaacttgcgcatcaggtcgataaaaccgtggccggtgttgcgcttgaagaagcgcgaaaagcccggttcgctcatctccaactgttgcgcgatcaccgacaggcgcacatcgccggtcagctcgcgcatcaaatagtcgaatgccttgttgatgcgttccgcgctgcgcgcatccagggtcggcgcgtagcaggggctggccagggccttgacctgttggggcggggcgtttttcagggtgtcgagcaattgcaggaacaggatcaagcgttgcaggccctgggcgttaccgatggcttccatccaatgcgcggcctgcagcgccgtgtcgccggtgaactccagtccacggcgggcctgttcgaacaacggctgcaggtcgccgagctccggcagggttctgcgcaaggcgaggagggcggcgccgtcgaattgcagcaccacgtcgcggccggtgaggtattcgccgggggccagttcgccgatccagtcgtggggcaggtcggggccgatcagtgcgacatgcccggcgctgaaggcaccgatgtagtcgccggccaccagtttgccgctgccttggcggatcaagtggatttcgaattcggggtggtggttccagcgggccaggtcgtagggatagtcatgttcgaaccagcggaagcagtggtccggctcgggcaggatcacttccagttcggcggggcggtgctcgaacagcgtggcacggctgatgggcatgagcgggcttcttggggttcttgtaatcgcttcaaaatacgcgcctcgggcgttcaggcgctacccccgcttgcgtccggcactgatacttttttaactcgcgcgtccccggttaaaaaagtaccagtcgagcatccgtcacgggtttgtgagtgcctggccaagctgctgtaatcggcgctcaacaacaaaaacaacaggtggaaaccgccatgttcaagctcccgcaagcgttgttcctgctgtccggcctggcgttggccatgcccagccacgccgccgacaccgtcaccatcgccacggtcaacaacagcgacatgatccgcatgcagcgcctgtccaaggtgttcgaagcccagcacccggacatcaagctcaactgggtggtgctggaagaaaacgtgctgcgccagcgcctcaccaccgacatcgccacccagggcgggcaattcgatgtgctgaccatcggcacctacgaaaccccgctctggggcgccaagcactggctggaacccttgacccagctgccggccgattacgatgccgacgatatcttcccctcggtgcgccagggcctgtcggtcaacgacaccctctatgccttgccgttctatggtgaaagtaccgtgacctactaccgtaccgacctgttccagcaggcgggcctgagcatgccggcgcacccgacctggacccagctcggcgagttcgcgtccaaactcaccgccaaggacaagggccaatacggcatgtgcctgcgcggcaaggccggctggggtgagaacatcgccttgctcagcaccatggccaacgcttttggcgcgcgctggttcgacgagcagtggaaacccgagctgaccagccccgagtggaccgcagccgccaacttctacgtcaacaccctcaagcagtacgggccgccgggcgtgtccagcaacggcttcaacgaaaccctggcgctgttcaacagcggcaagtgtgcgatctgggtcgatgccagcgtggctggctccttcaccaccgataaaagccagagcaaagtagccgacagcgtaggtttcgccgccgcgcccaccgaggtcaccgataaaggttcgtcatggctctacgcctggtccctggcgatcccggccacctccaagcacaaggacgccgccaaggcctttatcagttgggcgacctccaaggactacatccagctggttgccgacaaagaaggcatcaccaacgtgccgccaggcacccgccagtccacctataacgaggcgtatctgaaggctgccccgttcgcccaggtgaccctggagatgatgaaacacgccgaccccgcgcacccgtccgccaagccggtgccgtacgtcggcatccagtacgtgaccatccccgagttccaggccatcggcacctcggtcggcaagctgttctcggcggcgctgacgggtggcatgtcggttgatcaggctttgctgcaagcgcagtccactaccgagcgcgagatgaaacgcgccggctatccgaagtaacttttgacgggacatacccatgaaacgactggaaggtaaaagcgcgctgatcaccgggtcggcgcgcggtatcggccgcgccttcgcccaggcctacatcgaagagggcgccacggtggccatcgccgatatcaacctgcaacgggcccaggccacggccgccgaactgggcgcgcaggcctatgccgtggccatggacgtcaccgaccaggcctccatcgacggtgcgattgcggccgtggtggcccaggctggcaagctggatatcctggtcaacaacgctgcgctgttcgacttggcgcccatcgtcgacatcacccgcgacagctacgagcggctgttctcgatcaacgtcgccggcacgctgttcaccctgcaggccgcggcgcggcagatgatcagccagggccatggcggcaagatcatcaacatggccagccaggccggacggcgcggcgaaccgctggtggcgatctattgcgcgaccaaggcggcggtgatcagcctgacgcaatcggcggggttgaacctgatcaagcagagtatcaacgtcaatgccattgctcccggggtcgtagacggggaacattgggatggcgtggatgcgttgtttgccaagcatgaaggattggcacctggcgaaaagaagaagcgggtaggggccgaggtgccgtttgggcggatgggcacggcgcaggatctgaccgggatggcgatcttcctggcgtcaaaggaggccgactatgtggtggcgcagacctacaacgtcgatggcggcaactggttgaactaggacccaatgtgggagggggcttgcccccgatagcggttgggcagtcacagttgtgcaatctgacccactgctatcgggggcaagccccctcccacagttgagcctctttgttcgttgactcggggctaatccgcaaagctgcggtcgaagaagtaaacctctccaggcttgaggttctccaccgttgcctggggcctgccgccttcaccctgtttcttgcgcccggtctcacgcaagtacccggcctccgccagcttcaacaaccgctggcgaatactggtcttcaacactggccgcgccagcaccagggaaaaaatcgtggtcgcttccggcgcactgaattcattgcccagaaacatcagcggcacgctgctgtacaacgacttggaaaacaaacgttcctgcaccttcgccacaatgctgttgtggtcgaacggcaacttgatgccgccactcgccaccgccgtcagcgaaaaccagccctggtgctcacccagcgtcacgtcctcgttcacgatcgccaggtaatgggtggacgacgaccagcagcgcggatcgcgaaacgcatcccccaccgtccccacctgttcgctccaggccaggtccagtccgaccttgtcacttgctcgcaagcgctccaccgcatcctcgaggctcagatcttgcacgccgccattcaccaccacccccggcaacgcccagtgcccggcgaagggctcggcgtcgcgctggttcagcagcagtttcagttcgccagaggcacggcagtaaaacagcacgcacaggtcgacggtatggaggtaggcgctacggggcatgtgatgtccttctaaacagcagtgcggcacagtctaacggatcgaacagatatgtcatgtactgactccaggatagataagtaaatgtttcttgcaatgaaagtacatgacgtgtacttttgtttccaggccacaggagaaccaccatgaccctcgcgacaactgccattgcctcattcgacgtcgacgcccagaagagcttcacgccgctgtgccccaacgagttgccggtggccggcggtgaccggatcggcgccgagctcaactacatggccagccttgccggccatcgtatcggcagtaaggacgcccacaccccgcacgcgccctgggtggtggcgcagcacagcgacatgttgcaacccaccggcctggaccacgccgatgtgacctgggtgagtcactgtgtgccgggcaccgaaggcttcaacctgctggacgagttgcccacgccctatgactacgactacttcatctggaaaggcgtcgaacccgacctgcatccctacggcgcctgctaccacgacctgcacgacaagctgtccaccggcgtcatcgagtatttgaaaggccaaggcgtggttcgcgtgatcgtcggcggcctggccctggattactgcgtcaagaccaccgcgctgcagttgctcaaggccggcctggaagtggtactgcacttgccggcgtgccgaggcatcagcgaggagggcggtgtacaggcggtcaatgagttgctcaaggccggtgctgcgatcagccgcacccgcgaagaactggccgcgatggccacgcgttaaggagaaacaccatggaaagtgcctacgactacgaatccccggtgatccagggtttgctcgacaccgattactacaccttcaccatgatgcaggcagtgttgcaccagtaccctaacgtcgatgtggaatacaacttcatcgtccgctccagggaaaaactcggccacctgattcctgaaatccgtgccgagctggagaaactcgccagcctgcggatgcgcgaaggcgaactgcgcttcctgttcaaccctcgttttcgcgaatacctcaccccggattacgagcgcttcctcggcttgttccgattcaacctgcgctacatccacgtcagtgaagtcgacggccaactcaacatccgcgtggttggcccgatgctgcactgcatcatgttcgagcaaccggtgctggcgttggtcagcgagctgcgcaaccgagacaaataccccgacgtgaccctggaagacgtcacccgcaagctctaccagaagttcgactggctggagaaaaacctcagccgcgatgaactggccgacctgcgtgtgtcggacttctccacccgtcggcgcctgtcgttcaaggcccagcgcgaagtggtggacatcatgcgccgcgacttccccggccagttcgtcggcaccagcaacgcgcacttggcctacgaattcgacctgccgctgatcggcaccatggctcaccaatggctgatggtgcaccagcaactggggcgcctgcgcgagagccagaacgccgccctggaaaactgggtgcgtgagtaccgtggccgcctggggatcgccctgaccgactgcatcagcaccgactttttcctcaaggacttcgatctgtacttcgccaagctctacgacggcctgcgccaggactccggcgatcccatcgtctgggccgacaaggtactggctcgctacaagcagctgggtatcgacccgatgaccaaggacctgatgttctccgacggcctgaacttcgaaaaatgcctgccgatcctgcgtcacgtgcgcggcaaggccaagttcggtttcggcatgggcaccagcctggcctgcgatgtggacggcgtggagccgctgagcatcgtgatgaaactggtgcgggtgcacggcgagccagtggtgaaattctccgatgacccgatcaagaacgtctgcgaagacgcctcgtttttgcagtacgcagcacaagtgttcaacgttggcagtgtggaggtgtgacatgcaagaacgtatcgcacgggaactgaacatcaatcgcgcgttgacccaaggcggcgaacccgaggaaatccaacggcgcatcgacttcatcaagaccaccttgcgccactcaggctgcaaggccctggtattgggcatcagtggcggcgtcgactccctcaccgccggccgcctgtgccaattggcggcagagcaactgcgcagcgagggctacaccgcacgctttatcgccatgcgcctgccctacaagacccaggccgatgaacgtgacgcccaggcctccctggacttcatcaccccggaccacatcgacaccctcaacatcgccgccagcgtcgacggcctgatggccagcctggccgccgccgaagccagcgccgagcatgtcgatttcatcaagggcaacgtcaaggcccgcacgcgcatgatcgcgcaatacgccgtggccaacctgcacaatggcctggtggtgggcaccgaccacggcgccgaagcgttgatggggttcttcaccaagttcggcgacggcgcctgcgacctggccccgttgtcgggcctgaccaagacccaggtgcgattgctcgccacggccctcggcgccccggccaatctggtgcacaaacacccgacggccgacctggaagaactggtgccgggcaagctggatgagcatgcctacggttgcacctacgcagagatcgacgcctacctgatgggcgaaccggtgagcgagcgggtgaggacgattgtcgagggggcgtacagcaagacagcgcacaaacgtgcgctgcctatcagtccggcttgagttgacgatcagattttgacgttttcgcggatgttccagccgaaccgaatcggcccgccatcctttccgccatcggccttctggggctgatagctgacttcgatcctggcgaagttaaggctgatttcctctgtcagtaggtcatgggttgtcgctgcgcgcgtgtcgtaggaggcgaccatgacttccttcaaggtgatcaccaggtattccacgctgttatcgcccccagccttgcgtaccacgatgcgcgcttcgggataatgcttgccggttgcgcaggccatcatcaggttgggcgaggatttatccagtgacttttcaatcgcgatattggccatatccaccttgccggcaccaccgcctgtaccactgtgcatcgagcctgactgagtcatcctccagccccagcgggaaatatcgatttcatcgcgatgcgcctggtccctggactcgcccttgatgtcccccagcttcaaaaacatatcggttgccatgtccgctccttgtcttgtcatccgccggtagtggcgcggggcgtacttttccgattccgacgattgaccgcaagacgctaaggcgagaacgggaagtgcctgtctacaaaaaggaaactttccgacattcttgccggatattgattctttacgctctgcgctcttgtgaattcaggagtcaaggaatggcgaccagtgtattgagggacggcttccccagtgcccacctcgcgacgcgtgaacgggtggaaagcagcattgatctacgccggttgtttgcggctatcgacgccgatccggcgattgccggggcgggggtggtgtatctcgattccactctgtggccggtgacgttgcgtgagtttcaaccgatttgcagcgtgttgcccaagcgggtgatcttgcgggaaatgccggcttcgatggcaaggttggattttgtgcgcaggttggagcatgagccacgggagtcggagcttgtattcgaggcgcttgggatgggattggcgtgtgggagtgtggttttaggttggattgtcgcggtcagtggcaccgttgccattccattttcggctggcgccagttcagtgattgccgctgttggttatacctctgctgcagcaagtttcgttcaatgtgtcgttgggggataccgtgtgtacaacgagctcaccgagccttcgaataacgaatcattggacagtgatcgctggtaccaacacgtaaccgctgcattggacgcagtcgcactggtgggtgcaagtacctcgttcctaacaaccctgagattggttaaagcaacgaaggtgagtaccggaaagaattggcagcaggtattgagggggcttacccgacaagagcgagcgaagctgacgaaggagttactgagtatccagcatccacatctatcttcgaaaatgttgaggttaaggcagctggaaggacatttacctaagcgactgacaccagcacagttgcgccacgcgacagtaactcaaattaaagatgttctaggtgcatcaatgactgtgatgggcagtgctgtatccggcaatcttcacacaattgccgtaggcctccatgaggagtttgaagaatgatctttctgatgacgcctgaggaattttggtgtttcctgaaacgttactttccggttcttatgggggcgctttttgctcaaggctttgccgttgcaatcggcgtaccgatgatctttgacggttactttcatggattacctattgccgacaatctcaaatattcctttttttcagttctcggtttggcttttcttattgcccactgcaatttcatggtcgtgcgtggctatccaggttggttatggatcccggtgatcctgatggtattaagtctgttcggtgttttaccaacagtcgaataccaccctcacaaggtgttctatgtgctaggccttttattcccgctgatggctctgttgctgctcaatagtaaacgtcaccgagaagctcgagctgaatgggtaaaacttcgtcaaaagcgtcagcgtatcgcgaagataatccgtacccagcgtcaacgagttaggcgccgggcaggattatgaaggcctaccgctcgatcgaccgactccaccgcgcattccactccggccgtgcctggttgacctggtcccaatcgatcgaaatcgccgtctgcaagtaaccctgcatcgcttcgacccgcgcacgggtcttgtcggtggtcggcgtagtcgggttcgaggggatctggtcgccttcttccagcgcaggggcctgggcttcggcggtcagcaggaaggccgcaagtttctgcgccagttccggctggtcattgcgcgcaatcacgcattcggccacgttcagcaccaccgcgccttccttgggctgcgcgtattccatgggcacgccgagcagtttctgggtggcgacctgggttggggtgagggggaagatcgcggcttcgtcggtctgcaccatctcggagattttcgccgagctggcgatgtattccagcacgttggggccgacggtctttggccaggccttgaagccgggttccacgttggtttcgtcgccgccctggatgcggttgaacatcaggaaaccgtgcaggccgaaggtggacgacgccagggactggaacaccactttctccttgaagcgcgggtcggccaggtccatccatgaagtgggcgcggcccagcctttttccttgaacattttcgcgttgtagcccagaccggttacgccgagggtcacggctacggcttcgtccttgatcttcgccttggccgggatctgctccagggtcgggctcggcgccagcttgtcgcacaagcccatggagatcgcgcggtacatgatgccgtcgtcgaggaacatcacgtgcatctgtgggttgtctttgttggcctggaccttggcgaggatgtccgacgaggtgccgggcacgatcaccaccttgacgttattcgctttttcgaacgcgggcagcaccttgtcggcgtacacccgttccatggtgccgccgttcatgcccaggtacagcgtgggcgcggcgtgcgccgttgaggcgagcagggcgagggacaagcaggacagcgcgatacgtgggttcatggatgtttttcctctcaggcttggaaacgacggatggaaaacgcttcgatggggtggcggctggccccgctgcagacgatctctgccagggcttcaccgaccgcgggaccgagctggaacccggcgccggcaaagccgaaaccgtggagcaagccgggttgggtgctgctggggccgatcaccggttcgtgatcgggaaggtaaccttcggtgccgctccaggtacggatggcctgggcgcccttgagaaaggggtagagttcgccggcgttgcgcaggatctccagcaccgccgcctgccctgggcgcgcggtcagcgggccgagggcaaagccgcgaccaccgccgaggatgcaattgcccctagcgacctgccgcgcataaatcccgccaccttcaacgccggtgctcacgttcatcaccaccggcaagggctcggtgaccagcatcgccggatgcgccgaggtgatcggcaccgcttcgccaaactgcgcggcgacgcttccggcccaggcgccggcgcagttgagcagccatggcgcttgcaggtgcaggccgttggcgcagttcacctggaaccggcggctgtcatgttcgatgcggatcacctcggcctgctcgtacacgacggcgccataacgctgtgcggcacgggcgaaggcaggagacaccaggcgcgggttggcatgtccgtcttccgggcacagcgaggcgcccacggcaatatcgccgacccaggggaagcgtgcgcgcaattcggcgtagtccagcaactgcaggcccaggccaaagccacgggtctgctcggcgtacgcctgcaacgcggcgaaatcggcatgactgcgcgccagcttcaaatgcccggagcgcacgtattcgccgtcgatgccgatcaaccctggcaagtcggcccacagttgatgggcgcgctgggacaatggcagttggtgcaagggccgaccctggcgccgcacgccgccatagttgacgccactggaatgcgagccgcaaaaatcccgctccaccaaggccacgtgctggcctttctgcgcgagcatcaaggccgccgaggcgccgacaatgccgccgccgaggacgatcacgtcgatcatggctgcacctccacgccaaacggcagcggcttgatcggtgcctggccgcgcaggcggcccacgtgttcaatggcgcggccgctgcgttcggcgacaatctccgccgccgccagcccacacatccggccctggcagcggcccatgccgacgcgacagtgggccttgacccggttgagctcccagtggccttcatccaccaccgcgcgtatctcgccggcgctgacttcttcgcaacggcacaccattaacgcgtccggcgcctgggccgcccattgctcggggaaggggaacgcggtttccaacccatgacgaaaacgctggatgcgcgccagttgctgctccaatacggcggggcggcgctgatcaatcgccacgccagaatcttccagcaccgccaatgccgcacgttcaccggccatttgcgcggcgtccgcacccatgatgccggccccatcgccggccaggtacacaccgtcgacgctgctgcgcccggcgttgtcccgttgcggcaaccaggcacggttcaaggtgttccaggcgaactcacagccgagcaagtccgccagttgggtctcgctgcgcaacgcgtgggcgaaagccacggcgtcgcattccagacggtgttcaccccaacgaatgccgctgactcgctgttctccgtcgatcttctgcagcgtggcgccctgatgcacggcaatcccatgggcgctcagccaggcgcggtaatacaggcccttggccaaggtcagtggttgcccgagtagcgccggcagcgcacggcactgtgcactgaacggcgcgctgtcgagtaccgccaccaccttggccccggccttggcatattggtaggcgaccagatacagcaacggcccgctgccgcagaacgccacgcgctcaccgatggcgcagccctggtatttcaaggcgatctgcgccgcgcccaggctgtacacgccgggcagggtccagcccggcaccggcaggatacggtcggtggcgccggtcgcgacaatgatcctggtgtattcgacgctctcggcccggccgttgttgagcatgtccaggcgaccgtcctcggcattccacaccagggtttgcggtcgatagtcgatcagcggcgccagctcatctatcgtgcggtgcacggcttgggccttgctcgcttcaaatccgtagatctgcctggcggtgcgctggaagcccaggggttgccgccgatagatctgcccgccgccgcgcaggctttcatcgatcaggcacggtgtgatgccatggtcgagcagggtgcgcgccgcgctgatcccggccgggcctgcgcccacaatcaccaccggcttcatggctggcgccccgggtcacggctgatcgcctggccttcttccagcagcgtcgagcaggcgcgcacgcggcggccgtcctcaagccgcacccagcagtcctggcaggcgcccatcaggcagaaaccggcgcggcgctcggcgctgaagtcactgccgcgcaggtgttcggcgcaggtcagcacggcggtgagcaaggtatcgccaagcaagccgctggcgggttgaccgtccagggtaaaggacagggcagggcggccggtctcggccacacgtttgaacaaggccatcaatgtttccccaccagcacgcggtccaggccgtagacccggtccagcagaatcatggtggccgccgtcaacgcaatcaccagcgccgacaccgccgccatcatcgggtcgatggactcggtggcgtacacatacacgcgcaccggcagggtttgcgtggccggcgagctgacgaagatcgacagcgtcacttcatcgaaactgttgatgaacgctagcaaccagccgccggcgacaccgggcagaatcatcggcagggtgatctggcgaaacagcgtaaagcggccggcccccagggattcggcggcctgctcggcactgcgatcaataccgatggcggccgccagcaccaggcgcagcacatagggtgtgatgatgactacgtgcgcgagcatcagccaggtgaagctgccgttgacgcccatcaatgcgaacaagcgcagcatcgccacgcccagcaccaggtgcgggatgatgatcggcgacaggaacaacgcgctgaagaagttgcgccccgggaacgtgtaccgactgatcgccaacgccgccggcaccgcaatcaacgtggccaggctggctgcggtgaaggccaggaccaggctgttgtagaacgcctggataaagtcggcccgctcgaacaccgcgcgaaaccagcgcagcgagaagcccgaagtgggcaggctcaaggtgttttccggggtgaacgccaccaggcacaccaccaccagcggcgccatcatgaacagcaccaccaagccgtggaaaccgagggccaaaggaccgtttctggacatgcgcttaaacccccagggactttttatagcggccttcgaccatgcggttccagctcagcatgatcagcagattgaccaacagcagcaccaccgcgatggtcgcgcccatgggccagttgagttccgagaggtactggtcgtacaccacggtggcgaccattttcaggcggcgcccgccaagcaggccggggatcgcaaaggagctcgcggccaggccgaacacgatcagggtgccggacagcacgccgggcatgacctgcggcagcacgatcttgcgcatcaccgtggcctggctggcgcccagcgacaatgcggcctgttccgccgacgggtcgagcttctgtagggaggtccacaccgggatgatcatgaacggcagcatcacgtgcaccagcgcgatgatcaccgcgaacggcgtgtacagcagcttcaccgggcgcccgccgagcagttggatcagttggttcaccaggccatccgcgcccaatagcaggctccagccgaaggcgcgcaccaccaccgaaatcagcagcggcgtgaggatcaggatcaggaagatcgagcgccacggcgtgcccatgcggctgaggatgtaggcctcgggcacaccgatcaccacacacagcagggtcaccagcgcgctgatccagaaggtgcgccagaagatctcgtagaagtacgagtcgctgaacaatgacaggtaatgggccaaggtccattcatcggccttcacgcccacctggtagtcgaacacgttgaacgacagcaccagggtcaggcccagcggcaaaaccagcagcccggcaaacagcaccagcgccggcagcgacagcaggtaaccgcgactcatgcgtgcacctcgtcggctgccagtacgcgcagcaagtccgcatgccagtccaggcccactgccgcgccgcagcccagcggtgcgctgccatcgttgctgcgcaccacggtgatctcgccgaggtcggtgtggatgtggtacagccattggctaccaaagaagtaacgatcgagcaccttgccttgcaggcgaccggcacccgcgtccaccagcgtgatcttttccgggcgcaggctcaggaccagctcgccgtcgccgcgttcatgccgtacttgcggtatccccaactgatcgtaatcgccagccagcaggttggccttgccgacgaagtccgagatgaagcgcgtgcgtgggtgttcgtagagcttgtacggcgcgtcgatctgggtcacgcgcccggcctgcatcaccaccacacggtcgctgatggacagcgcttcagcctggtcgtgggtgaccatcaaggtggtgatgccgacggcgcactggatgcggcggatctcgaactgcatctcttcgcgaaggttggcgtcgaggttggacagcggctcatcgagcagcaacaccggcggttcgatcaccaacgcacgggccagggccacgcgctggcgctggccgccggacagttcccgggggtagcgctcggcatgctgggccaggcgcaccagttccagcacagttttcaccttgctggcgatctcggcggccggcaccttgcgcatcttcaggccgaaggcgacgttgtcgcgcacgctcatgtgggggaacagcgcatagctctggaacaccacgcccaggccacggctggcgggcttggcgtgggttatgtcgcgcccatcgagcaggatctgcccgccgctcacgtcaacgaagccggcgatcatttgcagggtggtggtcttgccgcagcccgaggggccgagcagggaaacgaactcgcctttttccaccgccaggtcggtggcgaccaccgcgtcgacggcgccgtagcgtttgctcaaggcgttgagttggagaaatgccatgtctgcgttccaccttttttgagtcgcgtcgaaacgcgcttttttgttttgggcagatgcgaatgagctgttgccggtgcgttggcgctcgatcttgagtcggctgccggttgttgttcatttcgcccctgtggacgcagattaggacgaagactaggatgggcggaagatggaatttcactgaacggactattattttcagatttattcactcaccggaatttaccaagagattgagtgttatggattccactgatcgaaatcaaagccgcaaagaagtcggggcgggcggggtgtctcgtctattcgcgctgttgcgcaccctgggtgacgtgccggagggcggcgaacgcgtcacccagctggcgcaacaggtgggtctgtcgcaacccaccacccatcggctgttgcgcagcttgatggacgaaggcatggtcgagcaggacgcccgcagcaagcgctatcgcctgagcctggagttcttcgccctggcggcaaacgcgagcaagaccggcaacctgcgcgacctggtgcgcccgagcatgctgcgcctgagtgcgtcattgggtgactcgctgttcctgctggcgcgcagcggcttcgatgcgatctgcctggaccgcagcgaaggcccgtacccgatccgcaccttcaccggcgatatcggcgggcgcgtggcattgggtgtggggcagggcagcctggcgatcctggcctttctgccggaggaagagcgcgaaaccgtgatccgctacaacctgccacggctcaaggacttccacctgtatgacgaagtgctgttgcgctcggaagtggagaacgtgcgtaacctggggtatgcggcgcgcaataccggggtgctggaaggcatggccgggttggccgtacccatcctcaatcgggatgggcacgcggtggcggcgttgagtgtggcgaccatcagcgatcgcctggggccgggccggttgccgatggtggtggagttgctcaagcgcgaagcggcggcgatcgggccacggatcaatccgtttgatccgacgttgcgcaggccctcacaaacctttggcggataacccatttcagccacgatgaagatcaaaaagtctgagcgggctggctcgcgagtgaggtgggtcagcccttgtttgtcggcgcagtgggattaatcatcgtttccggccttacccgttgttcgtactcttcggcgctgatcaagcccaattgcacggccgcctccttgggtgacaagccctcgtccgcggccttgcgggtgatctgggccacgcggtcataacccagcagcgggttgagcaccgtcgccatcagcaatgaatgctccacgttgtgtgccaactgcgggcggttcacctccaggccgctcagcagcttgtgggtgaacaggtcgacgccgtcggtgagcacgtcgatcgattgcagcaggttatggatcagcaccggcttggccacgttcaattcgaaggtgctcgaagcgcccgccagagtgatcgtggtgtggttgcccatcacctgcatcgccgcctgcaccagtacttcggcaatggtcgggttgcgtttgccgggcatgatcgaggaggtcaggccatcgtccggcacgatcaattcacccaggccgcagcgcggacccgaaccgagcaggcggatgtcattggcgatcttggtcaatgacacggccagcacattcagcgcgccagaggcttcgaccagggcatcgtgggtgcccatgccttcgaatttgcacgggttggtttcgaagggttcgccggtgagccggctgatttcctcgcagaacgccacgtcaaaaccgacaggtgtattcaacccagtgcccaccgccgtgccgccttggggcagcaggcaaaggcgcggcatgcacgcttcgatgcgcgcgataccgtgctggatctgctgggcaaacgcgccaaatgcctggccctggctcatgggcaccgcatccatcaggtgggtgcgaccgattttcagcacgtcctgccaggcgtctgccttggcgttgagtccatcacgcagatggcccaatgcaggcagcaggcgaccgcgcagttccagcacggtggtcaggtgcatcaccgtggggaaactgtcgttggacgactgcgagcggttcacatggtcattgggatgtaccggcgacttgctgcccagttcaccgcctagcgcgaggttggcgcggttggcaatcacttcgttggcgttcatgttggtctgggtgccggagccggtttgccagatcgacagcggaaagtgcaggtcgagctcgccgttggccagttcgtccgcggcctgttcgactgcctgcgccagggccggtgccagcgcgccgaggcgtgcgttggcacgggcacacgcgcgtttctggtggccgaaggcgcggatcaggctggcggggaacggctgtttgccgccgaacacctccagtgcccgctgggtttgtgcgccccagtagcggtcggctggtatggacaccgggccgaacgcgtcgtgttcgattcgctgagtagtcatcaggagcctcgttaaagcgcagcgccggcggcacggccgagcacgcgttgatattcaccctgggcggtctgctgggagaactcgccggaccatttcgataccaccaccgtggccacgctattgccgatggtgttgcaggtggcaatcgccatggacatgaagcggtacacgccgaacagcagcgccaggccttcggccggcagtacgccgatggcggtcacggtcgcggcgaacaccacaaagctgccacccgacaccgccgccgcgcccttggaggtcaccaacatgatcgcaatgatgcccagttgttgttcccagctcagcggcacaccgtaggcgttggcgatgaacagcacgcacagcgacatgtagatcgatgtgccgtcgaggttgaacgcatacccggtaggcagtaccagaccgacgctctgcttggagcagccgaatttctcgagcttttgcagcaggcgcggcagggcgctttccgacgaggcggtgccgagcacgatgaagatttcatccttgatataggtgaggaagcgccacaggctgaagccgctcaaccggcacacggcgcccagcaccacaaagatgaagaaggcgatgccgacgtagaacatcaacaccaggttggccagggacatcagcaccgctgtgccattgctgcccaccgcgtatgccaccgaaccgaaggcacccaggggcgcgaatttcatgatcaggttgatgaactcgaagaagcattcagagatacggttcaggccgtcctcgatcacttcccggcgctcgggcttcagggccagcagggcgaagccgaacagcaccgagatcaccagcacttgcagcaactggccgccagcgaaggcaccgacaaaattgtccgggaagatgccgtagataaagtccatggtcgaggcgggcgcatgccccttggctacggcggcactcgcggcggcggcagcggcgctgctcgggtgggcgtcatgcatgccggagccgatctgcagcaggttgccccacaacaggccgatggccagggcgatggtcgacaccacttcgaagtaaatcagcgcgcgcaggccgaccttgccgacccgcttgatatcaccggccgaggcgatgccgtggaccactgtgaaaaacaccagcggcgcgacggcggtcttgatcagcttgaggaagatatcgccgaggatcttgaaactggcggccagctccggagcaagaaagccgaaggcaatgccgaggaacatggcggcgacgacctggaacgtcaggtccttgtagagcggttttttggcgggggtggatgacatgtctgtgatctcattgttgttatggttcggatgacgctctgtgggagggggcttacccccgatagcagggtgtcagccacctgatttttcccggatacaccgctatcgggagcaagccccctcccacagttggacctccattggttttcaggtcagcgggggaccgcgccctggcgcgccagcgcgatatccaccatctgcggcgccagccccagatagttggcggggtcggtcaggcgttgcagttcggccacatccaattgcgcagtggcttcgccctgggcgagcagggcgtcgagcaggctggtgccctggtcgttggccatgcggcacgcggcgtacaccacatcgtgggccacctggcgaccgagggccggggcgaggcccatcatcacggcttcggcgacgatcaggccctgggtcatgtcgaggttcctgcgcatgcgctcggggcgcacttccaggccggcgagcatgaaggtcgcctggccgagggacgcggcgctgagggcgaaagcttcggggatggcgatccactccgcctgccacgggccggtagagcgttcgaagtcctggatcatcgcgtcgagcatcagcccggcgtgttggcgcacgcccttggcggcggcatacatcagctcgcaggaaatcgggttgcgcttctgcggcatggtgctgctggcgccacggcccttgacgaagggctcgtacacttcgcccagttcgctggtcatcatcatcatgatgtccagggcgatcttgcccagggagccggtgaccaggccgaggaagttcaaggtctcggccagcccatcacgggccacatgccaggtggcttgcggcacgcccaggccgagttcggccatcaaggcttcctgcacctgcaaccctttgtcgcccagggaagcgagggtgccggccgcgccggcgaattgaccgatttcgacccgtggacgcaactccaccaggcgctcggcgtggcgatcaaacatgctcagccacaccgcgcacttgtagccgaaggtgatcggcagtgcgtgctgcaagtgggtgcgacccgccatcggcgtgtcgcgatagcgcgcggcgaggccagcgagcaggccgcgcacggtctggatatcacgctcgacgatggccagcgcagcgcgtatttgcaggaccacggcagtgtccatgatgtcctgggtagtggcgccccagtgcacgtagcggccggcttcaccgcagatgttcgacagttgctccaccagcggcaggatcgggtaaccgactatctcggtctcgtgctgcatcagcgccaggtccagggcttcgtaccgcgacagcgcggcgatctgctcggcggcgtcgccggggatcaccccgcaccgcgcttcggcgcgggccagggcgacttccacttcgatgtaacgctcgatcagtgctttatcagagaacacgccgcgcatttcggcggtgccgaacatgtcgcggaacagggcggaatcaaaaacggtactcgacatgggcaaatcctaattgttatttttaaatcatacatatttaatatgtccgtacaatatgattgcgcctgtgctgatacactgtcaactcgactgcgagggtaaaaatggaaagtgtgagccagaggcgttatgcggcggtggccaaggacctgatcgatcagattggcaatggccattacccggtagggtcgttattgccgactgaattcgaactctgttctctgtacgcagtgagtcgccacaccgtgcgcgcggccatcgaccagttgcaggggcagggcatggtctcgcggcgcaagcgtgtgggcacgcgggtcgaagccgcttcgccccagggcgggtattcccaggcgatggcctcggtggccgacctggtgcaggtcgctgaaacccatatccgggatatccaaggcgtacgcgaattcgtcgtcgatatcgcccaggcccggcgcctgggactggagccgggtgggcattatttctgtgtgtcgagcatcaaggtcgatgccagcgccggcaatgcgccgctgtgctggaccgacgtgtacgccgaacaggcctttgccgaagtgatccccgaagcgcgcaagcacccggatgaactgatcgccgcgctgatcggcaaggcgttctcgcggtctatcgatgtggtggaccagcaagtgcggccggtgcagttgtcgaccgaactggcggccagcctcaaggcacagggcggggcgctggggctgaatatcatccgccagtatcgtgatgaaaatggcgggctgattgcggtgtcggagacggtctatccagcggaccgtttcaccctgaccatgcagatgaagcgcgacaagctctgatccatacgacgataaccttgcatctggtaaaactttggctaatatgacccgggtaaaacatatatcacccgggtaataaatatgcctacgcgcacacttcctgcttgtaccgcctttatccgccaccagcgtgtggcggcaggttcctatacggacgtcgccaagacgctcgccgagcttgaccagcccacgggcagcttcctggtcttcgacgatgccaccggtaaccaggtcgattttccctggcccgcaggctatgcgcccgaactaccaacccaggtcgacgtgaccgacgagcctcccactccccccttggtcggacgcccgaaactgggggtggtcgcgcgggaagtcacgctgttgccgcgtcattgggaatggctgggccagcaacgcggcggtgcttcggcggcgttgcggcggctggtggatgaagcgcgcactgcccatgcttctcgtgaccggatacgccaggccaaggaagccggctatcggttcatgagtgccgtcggcggtgacctgcccggttttgaagacgcctcgcgcgcgttatttgcctttgatgcggcggacttttcccgcaagatcgcgcactggcctgtagacgtgcagacctacctggcctggctgtcgcgcgacgcgttccctgtctgacaacaactcctggattcgaacctcatggacgtcacccagcaacggccgttgtggcagatctacctgatctttctggcaccgatggtgctgtccaacttcctgcaaagtttttccggcaccctcaacggtatctatgtcgggcagatgcttggcacccaggcgctggcggcggtgtcggggatgtttcccatcgtgttcttttttattgctctggtgatcggcctgggggccggcgcctcggtactgatcgggcaggcgtggggcgcgcaggaaaccgcgctggtcaaggtgatcactggcgccaccctgacgctgggcgcgttggtgggggtgatcgcagcagtactcggtagtctgtttgcacgcccggcgttgcaggcgctcggcacgccggtggatgtgctcgacgatgccgtgggctatgcgcagatgatgatgttgatcatgccgctgctgctggtctttattctctatacccaattgctgcgtggcgtcagcgacacgatctcgccattgctcgcgctgatggtctctaccctggtcggcctgctgctgacaccggcgctgatccgtggctggatcggcctgccgcccctgggtatccagagcgcggtctacgccgggttggtgggtaatgctgcggcgatgctgtttttgatcctgcgcctgcggcataagcatcatgtgatggcgccggatcgcgaactactggcggccctgcgcctggatcgggtcattctcggcaaggtcctgcgcatcggcttgcccacgggcttgcagatggtggtgttgtcgctgtcggaattggtcatcctcgctctggtcaatggccacggttcccaggccaccgcggcctatggcgcggtcacgcagatcgtcaactacgtgcaattcccggcgctgtcgattgccatcaccgcatcgatcctcggcgcgcaggcgattggtgccggccgcctggagcgcatcgggccgatcctgcgcaccgggctgctgatcaacacctgcctcaccggtgggctgatcgtgctcggctacctgctgtcccactggctgctcggcttgttcatcaccgatgacgcggcgcgggccaatgccgagcacctgctgcacattatgttgtggagcatcctggtgttcggtttccaggcggtggtgggcgggatcatgcgcgccagcggcgtggtgttcatgccggtggcgatctcgatcttctgcgtgctctgcgtggaactgccgatggcgtacgtgctcaacgcccacttcggcctggaaggggtgtggatggcgtttccggtgacctacctggccatgctggcgttgcagactgtgtattaccggctggtgtggcgacacaagcagatcaagcggttggtgtaaggctcaggccgcgcagcaacagttccaggctctgcaagccttgctccagccgctcgtccgggtgttcaccccgggcgatccacaaagcggtgttgagcaagcttccattgatcaactgcgccagtgcgtggctcggggcagggtggataacaccggtttgcatcaacgcctccaggcgttcgcgcagcgattcgacacagtgttgctgagagccggtgtcgcccagaacggctggcgcgtcctgcaacacaatgcgctggatctcactgtcttgagccatgcgcaagtaggtgcggcaacgttcgcaaaaaccgacccaggggtcggtggcctcagcggttatgcgctgcaggcgcgcatccatctcgctgtcgagctgggccaccacggccgccaacaagcccttcttgtcaccaaaatggtggtacaacgcaccccgggtcagaccggcgcgggcggtgaaatcgtccattgaggtattggcgtacccttgggctgcgaaagcttcgcgggcgctggcgatcagcctggcgcgggtgtcttcgatcatttcagcacgggctcggctcatgggtagggctcgcaatgggcaagtgatagattgacatacgctgcgtatgttacgcatgatttgtcacatacgcaccgtatgtattttgcctcgaacagtgcagatagcaagttccggggctttcagaaagaggtcacgcaggatggcaaacccttacgccgaattgttccaggtccctggcgcccgggcttttgtactggcggggatgctggcgcgcatgccggtctcgatgacggggatcggcttgatcaccatgctctcgcaggtgcacggcggttacggcctggcgggctcggtggcggcggtatttgccctggccacggcgttttgcgcgccgcaggtatccaggctggtggaccgctacagccaagggcgggtgttgccgattgccgcgtcgatcggcggcggggcgttgttgatgttgctgctgtgcacccacttgcaggcaccgaactggacgttgttcctgttcgctgccctggccggttgcatgcctaacatgtcggccatggtgcgggcgcgctggaccgagttgtaccgcggccagcccaagttgcagaccgcatttgccctggagtcggtgctggatgaggtgtgctttatcatcggcccgccgatctcggtgggtctgtgcgtggtgctgttcccggaagccgggccgctggtggccgcgttgttgctggcggtgggcgtcaccacctttgtgttgcagcgcgagaccgagccaccggtgcacgcgcatcaggggcatcacggtcgctggctgatcgcctcgccctcggtgctgatcctgatgatcctgctgctggccatgggcgtgatcgtcggcgtggtagatgtggtcagcgtcgcctttgcccagcatcagggccagccggcggctgcgagcatcgtactgtcggtctacgccatcggttcgtgcctggcggggctggcgttcggcaccctcaagctcaaggcgccgttgccccggcagttcctgttgtgcggcatcgccacggcgttgaccactttgccgttgctgctggtgaccaacatcgcagggctggcggtggcggtctttgtctccgggctgttctttgcccccaccctgattgtgtccatggccttggtggaacaggtcgtgcccgccagtcgactgaccgaaggcatgacctggctgatcaccggcctcagcatcggcgtggccatcggtgcggcgagctccgggtggatgatcgaccactttggcgccaccagcgggttctgggtggcgctggcggcgggagcggtcgtgttgggggcagcggtgttggggtatcggcggctaggatgatcagttgatcgcagggcaagcgtctgcgcagtgatgctgcagaaactcgttcaacgcttggcgggtcaggtcattgagcgtgacctttttgcgggttgccgccagcgccgccgccaggtgcaggtcatggccgacccggacattgaaggaacctttgcaaggtttctctggtgcatgccccagggtctggcaggtggcgaggtaatcatccaccgcctcacgaaaggccgtatccagttcggcgacggttttcccttcgtagctcaccagcgccttgatgaacaagaccttgccgaacaggcagttgtcttcgaggctggcttcgatggagccgatgtagccgttgtgtttcagttggttgttcactgaatcagctctcctgatttcaattgttcgatgatctggcgccgaatgtagtgtttcagttcgttgccagggtgaggcttgtgcaaggtgatcattgcactggggtcgccgatgtcgaacttgacgcggcttccagccccttcaatctgtgtgtagcccagccgacgcagcagcgtgacgagctcgggccaggtaaatgtcatttgctcgttgagaaatttggcgagcagcttttcatttttggacacggcgttccctgcgtgtaactaaatgtagttgcaaaaagtggtgttcgtcaatgctagctcgtgttcgggtggtcttcccgagattgatgtaacccttgatgacaccgtgcgccgcgcctgccatccccgctaatttttccctgtccggttcgttttatagggacgacgtgcctttgtgcttcctgcctactgctccggactccaagaaatgaatgctgaagactccttgaaacttgctcgccggtttatcgggttgcccctggaaaaacgccaattgttcctgcaggccctgcagaaagaaggcgtggatttttcccggttcccgattccggcaggggtggaggcgcaggatcgccaggcgttgtcctacgcgcagcagcgcatgtggtttctctggcaattggacccggccagcggcgcctataacctgccgggagcggtgcgactcaagggggcgttgagcctcggcgcgctggagcaggcgttcgccagcctggtcacgcgccacgaaaccctgcgcacagtgttccagcgccaggcggacgagcgcctgttgcaagtgccggcagatacctggttgaccgtcgagcacctggacctgagtcacctggccgccgccgcgcgcgaacaggccgtcaatgaggccgcgacccgtcaatccctgctggcgttcgacctggaaaacggtccgctgctgcgcgtgcaattgctcaagctcgacgcgcaggaacacgtgctgctgctgaccctgcaccacatcgtctccgacggctggtcgatgaacgtgctgatcgacgagttcatccgctgctatgacgcccacgagcgcaatgaagccccgcaactgccggccttgccgatccagtacagcgactacgccctgtggcagcgccgttggctggaagccggggagcaggcgcgccaactggattactggcaagcgcgcctgggcgatgaacacccggtcctggagctgcccaccgaccgcccgcgcccggccatgccgagctaccagggcacgcgccacaacttcgcgattgaacctgcgctggccacacagctgcgtagttgcgcgcaaaaacacaacgtcaccctgttcatgctgttgttcggtgctttcaatgtgttgctgcatcgctacaccgggcagggcgatatccgcgtcggcgtgccgatcgccaaccgcaaccgcactgaagtcgaagggttgatcggcttcttcgtcaacacccaggtcttgcgtaccgagctgaccgggcaaacccgcatcaatgagctgctgcaaggcatcaaggaacacgcactgggcgcccaggcccatcaggagttgccgttcgagcgcctggtggaagctctcaaggtcgagcgcagcctgagccatacgccgctgttccaggtgatgtacaaccaccagccggtggtggccgacattaccagtgtcagcaccgcctccggcctggaactggcattggtggagtggcaaggccgcaccacccagttcgacctgaccctcgacacctatgaaaaatccggcaccctgcatgccgcgttgacctacgccaacgacctgttcgacgcgccaaccatcgagcgcatggccgggcattggctcagcctgttgcaggccatggtggtcgacggtgagcagcgcatcggcgagctgccgatgttggctgcggatgagcagcaggtgctggtccacgggtggaaccagacgactgaggcgtacccgaccgagcgcggcattcatcacctgatcgaagaccaggcgcaggcaacgccggatgcgccggcgctggtgttcggtgcgaccacgctgacctacgcccagctcgatgcccgtgccaaccaactggcccacgccttgcgcgagcagggcgtcggccctgacgcgctggtggggatctgcgtcgagcgctccatcgagatggtggtcggcctgctcgccattctcaaggccggcggcgcctatgtcccgctggaccctgagtaccctcgggaacgcctggcctacatgatcgaagacagcggcatccagttgctgctcagccagcgcgccctgttgccactgctgccgaccgcgggcatccaggtgattgccctggaccagcccgcgagctggctcgacggttatagccgccagtcgccaagcgttgacctgcaggcgctgaacctggcctacgtgatctacacctcgggctcaacgggcaagcccaaaggtgccggcaacagccaccgtgcgttggtcaaccgtttgtgctggatgcagcaggcctacggcctggacgccagcgatgcggtgctgcagaaaaccccattcagtttcgacgtgtcggtgtgggagttcttctggccgctgatgaccggcgcccgcctggtggttgccgcgcccggtgaacaccgcgaaccggcgcgcctgatcgagaccatcgggcaacaccgcatcaccaccttgcacttcgtgccgtcgatgctgcaggcgtttatccatgaaccgggcgtgcaagcctgcaacagcctgcgacgcatcgtctgcagcggcgaagccttgccgctggatgcgcagttgcaagtgttcgccaagttgccacagacgggtctgttcaacctctacggcccgaccgaagccgccatcgacgtgacgcactggacctgcgtcgacgaaggcgccgacagcgtgcccatcggccggcccatcgccaatctcgctacgtacgtgctcgatgcccagctcaacccggtgcctgctgtggtcagcggtgagctgtacctgggcggcgccggcctggcgcgcagttaccaccggcgcccggcgctgaccgccgagcgttttgtgccgagcccgttcggtgacggtgcgcgcctgtatcgcaccggcgaccgcgtgcgccagcgtgccgatggggtgatcgaatacctcggtcgcctcgatcatcaggtcaagctgcgcggcctgcgtatcgagctgggcgaaatcgagacgcgcctgatgcagcacccctcggtgcgtgaagccgtggtgctggtgcaaggcggcaagcaactggtggcctacctggtgctggaagaccaggcgccggccgacctcaaggcctggctgctcgacagcctgccggaatacatggtgccgacccatatagtgcacctggccaggctgccagtgaccgccaacggcaagctcgaccgcaaggccttgccgttgcccgacgccgcgcctcagcaggcgtatgtcgccccggaaagcgacttgcaaaaagccctggcagtgatctggagcgatgtgctcggcgtggagcaagtcggtctggaagacaacttttttgagctgggcggtgattcgatcatctccatccaggtggtcagccgtgcgcgccaggcgggcattcgcctgagcccgcgggacctgttccagtaccagagcgtgcgcagcctggcgctggtggcgaccttcgagcaggcgcccctcatcgatcagggaccggtcaccggcgaggtgctcctcacgcctgtgcaacacagctttttcgagcaggcgattcctgcgcgccagcactggaaccagtcgttgctgctgaccccgcgagagacgctggagcccgtgcgccttgacgccgccttgacccgcttgatcaaccaccacgatgccctgcgcctgcgttttgtgcagcaggcggatagttggcggcaggctcatgccgagccggttgcgagcgcttcgttatggcagtcccaggtcgccggcgaggctgagttggccgcactgtgcgatgaggctcaacgcagcctcgatcttgaacagggcccgttgctgcgtgcggtcctggcaagcatggccgacggcacccagcgcctgttgctggtggtgcatcacctggcagtggacggcgtatcgtggcgtatcctgctcgaagacctgcaacaggcctacggcaacgccgcgttgccggccaagaccagcgcctatcggcagtgggcgcagcaattgcaggcccacgcgcagacgctggacgcgcaactggcgtactggcaggcacagaccgcaagcgccgacctgccgtgcgacaacccccagggcagcctgcaaaaccgcctgggcagcaccctcgaaatccgcctcagcgccgatcacacccgccaactgttgcaagacgccccggcggcctaccgcacccaggtcaatgacctgctgctgaccgccttggcgcgcgtcatcagccgctggagcgagcagcccgccgcgctgatccaactggagggccatggtcgcgaagacctgttcgacacgctcgaccttagccgcaccgtgggttggtttaccagcctgttcccggtgcgcctgcaagccgaaggcgagctgtcggcggcgatcaagtcggtgaaggagcaactgcgtgcggtgccgcataaaggcattggctacggcctgctgcgctacctcggtgcgcctgacgtgcgtgagaccttgtcgaccctggctgcaccgcgcatcaccttcaactaccttggccagttcgaccgccagttcaacgaagcagcgctgtttgttccggcgacccagggcagcgggcaggcccaggattgcgaggcgccgctggccaactggctgacggtggaagggcaggtgtacggcggtgagctggccctgcggtgggggttcagtcgcgagatgttcgaggtggcgactgtccaacgcctggcggatgactatgacgctgaactccaggccctgatcgaacactgctgcgccacgccggcggggcaggtcacgccttcggacttccccctggcgcgcctgacccagcagcaactggatgccttgcccatcgccgggccggcgatggctgatctctacccgttgtcgccgatgcagcagggtatgttgttccacaccctctatgagcccgaggccgaggcttacatcaaccagttgcgcctggatatcgacggcctggacctgctggcgttcggccgtgcctggcaagccgcgctggaccggcatgacatcctgcgcagcagcttccactggcttggcctggacagcgcgcatcaagtgatccagcgccgagtcgatgtgcagttgcacgtgatcgaagacatcgacgccgattgcgatgcgctcgccgctgccgagcgcgagaaaggtttcgcgctgaatgccgcgccgctgtttcgcctgatgctggtacgcggtgccggtaaggcctggcacctgatcttcaccagccaccacatccttatggacggctggagtaacgcccagttgctcggcgaggtcatcgctcattacgccgggcacagcgtgccggcgccgctggggcagttccgcgattacctgggctggctgcaccagcaagcgtcgggcgaggcgttctggaaggctgccctggcgccgctgcaagcgccaaccctgcttgcgcaggcgctgcgtgtgccggtcgaaggcaagggcatggctgaccatcaggtggtgctgggtgacgacttcacgcgtgccctgagtgagtttgcccgccgccataaagtcaccctcaacaccgtgctccaaggcgcatggagcgtgctgctgcaacgctataccgggcaggactgcgtggcctttggagccacggtggcggggcgctcggcaccgttgccggggatcgagcaacaactgggcctgtttatcaacacgctgcccatcatcagcgcggcctcgccagcgctgtcggtggctggctggctgagcgagctgcaagccctcaacctgagcctgcgcgaccacgaacatgtgccgctctacgacatccagggctgggcggggcagcagggcgctgcgctgtttgacaccttgctggtgttcgaaaacttcccggtggccgaagccttgaaacaaggcgcacccgccggcctgacgttcggccgcctgcataaccatgaacagacccactacccgctgaccctggggatcgaattgggcgccagcctgcgcctggagttcggctacgaccaggcccgtttcagcgctcaacaggtcgctcgattgggaggcaacctgcaccacctgctggtgcagatgctcgcagacgcgcaagcaccgctgggcaacctgcgcctgatggaccccgccacacgccgcgacgttctcgcccatagccgggcgaccggtgccgtcccgcgccaactgcgcgtgcatgaacgcatcgccgcccaggccgccgccacgcctgacgcgctggccgtgcaggcgggtgacgcacacctgagctacgcccagctcaatgctcgcgccaaccggcttgcccatcgcctgctggaactgggcgttggcccaggccagcgcgtcggcctggcggcacgacgtggcccgcagttgatcgtcagcctgctggcggtgctcaaaagcggcgccgcctatgtgccgctggacccgaactatccggccgaacgcctggcctacatgctgacagacagccggctcgacctgctgctcagcgaaaccgggctgctggccgacctgccgttgccccaagggctggcgcgtgagagtttcaccgcgtccggagaagaactggcaggctacccgtcgaccaatccaaccaaccatgccgccgctgccgacctggcctatgtgatctacacctcgggctccaccgggctgcccaagggtgtagccatcgaccatgccgccctcggccagttctgcgacagcgccgaggtctacagcggcttgagcgcggcagaccgggtgctgcaatttgccacgttcagcttcgacggctttgtcgagcaatgctacccgccgctgtgtgtgggcgcggcgctgatcatgcgtggcgacgaattgtgggacgcagggcaactggcgcggcacatcgtcgagcagggggtgaccctggcggacctgccggcggcctactggtatttgctggccaaggaatgtgccgtcgaccagcgcaccctgggcaacctgcgtcaggtgcatgtcggcggcgaggcgatgtcggtggaagggttgcgtgcgtggcacgccgccggcctgtgcgacgtgcgcctggtcaacacctacgggccgaccgaagcgactgtggtgtccagcgtgcacacttgccagttggcggacgccagtgatgcgtttggcgtgccgattggccgggccatcgacggtcgctccttgtatgtgctggacagtggtttcgaattgctcgccaccgagggtgtgggcgagttgtgcatcggcgccgaacacggtttggcccaacgttacttcgaccgcccggcgctgaccgccgagcgcttcctgccggacccgttttccgccgtgcccggcgcacggctttaccgcagtggcgacctggcgcgctataaccaggcgggtgcgttggagtatgtcgggcgcatcgatcatcaagtgaagatccgcgggttccgcgtggaaatgggtgagatcgaagccagcctgcaagctttgccgcagctgcgtgaagccgcggtcatcgcgcaatccagcgcgacgggcacgcagttggtggcgtacgtggttgccgccaacgggcagaccgtggacgctcaggcattggcggccaccttgcgccagtccctgccggattacatggtgccggggcactgggtcgtcctcgacgccttgccgttgaacaacaatggcaagcttgaccgtcgcgcactgccggcaccggacctgaaccaggcgcgccaagcctacctggcgccgcgaaccgcgctgcaaacgcgcttggccgccatctggcaagcggtgttgcaggtcgagcaagtggggctcaatgaccacttcttcgaacgtggcggccactcgttgctggcgacccaggtgatctcccgggtgcgccatgacctgcaactggaagtaccgctgagggcattgttcgaacaaccgacgctggaggcgttcgccgatgtttgcgcagggttgcaggcgaacactgcgctaccgctggtggcagtgacgcgcgaccagccgctggcactgtcgttcgcccaggaacgccaatggttcctctggcaactggacccgaccagcgcggcctaccatgtgccgagcgcgctgcacctgcgtggccgattggatgtcgcggcgctggaacaggcgttccaggccctggtgcaacgccatgagccgttgcgcaccacctttgtggaagagggcgagcacacttggcaacggattcacccgcaccttgcgctgccgatcgaacaccaacaggtcgaggcctgggcgatcgagcctgccgtggcgcaggagatccaacgcccgttcgacttggtcaatggcccgctgatgcgcgtcaaattgcttcaaatcgaggccgagcaccatgtactggtgatcacccagcaccacatcatctccgacggttggtcgatgcaggtgatggtcgatgagctggtggcgctgtatcagggccgggccgaactgccaacgcagctcatccagtacgccgactatgcccagtggcaacgtgattggatggcagccggtgagcaacaacgccaactcgactactggcgcctgcgcctgggcagcgagcatgccgtgctggaactacccctggaccacccacgcccggccgtgcaaagccatcgcggtgcacgccgccaggtgcacctggacagcgcgttggtcgccgggctcaaggccctggcccagcgtcaggacgtaaccttgttcgtgctgctgctggcgtcgttccagaccctgctgcatcgctacagtggtcaatcccagatccgggtcggcgtgcccattgccaaccgcaatcgcctggaaaccgagcgcctggtcggcttcttcgttaatacccaggtgctgcaggccgatgtgcacgggcagatggcgttcgaccaattgctcgtccaggtcaagcagcgcgccctcgaggcccaggcccatcaggacctgccgttcgagcaactggtgcaagccctgcaaccggagcgcagcctcagccataacccactgttccaggtgatgttcaatcaccaggaccgcctgcgcgccgcgccgctgcagttgcctggcctggacctgcaagcggtggattgggcagggcacagcactcagttcgacttgaatctcgagactgaggagtccgctgctggcctatgggcctctctgacctacgccaccgacctgttcgacgccgctaccctggatcgcctggccgagcattggcaaaacctgatgcacgcggtggtgcaggatgcgtcccaaaccattgatgaactgacgatgctcagcgtgccgcaatggcagcagatggtcgaaacgtggaacgacagcgctgtcgactacccccgcgaacgctgcgtgcaccaattgttcgaagcccaggccgtggcacagccgcaagcccttgcggtgcaattcaatggccaagccctgaactacggcgaactcaaccgccgcgccaaccgcctggcccatcgcctgatcgcggcgggtgtggggccggacgtattggtggcggtgcatgtcgagcgctccctggacatggtggtcggcctgctggcgacgctcaaggccggtggcgcttatgtgccattggacccgcaattcccggcggatcgcctggctttcatgctcgacgacagccgcgcacaggtcctgctgacccagccacacttgatcggtcacctggcgcacccgcagggtgtgcaggtattgatggtcgacgccgccgacgctgccgagcacaacccgcaggtcgaggtcacgccggaacacctggcctatgtgatctatacctctggttccaccggcaagcccaagggtgtgatggtacgccaccgggcgctgtgcagctttacctgcggcatggccgataccctggacatcggcattgacgcacggatgttgtcactgaccaccttctcgttcgacatcttcgccctggagctgtacgtcccgttgaccgtcggcgccaccgtattgctgagcggccaggaactggccctcgacccggaagcgatcatcgacctggtccacagccaatcggccaacgtgctgcaagccacgccgtcaacctggcgcatgctgctggaaagcccacgctcccagctgctgcacggtatcaagagcctgtgcggcggcgaagcgctgccggcggacctggcccagcgcatgctcgacctgcaaggcccgctgtggaacctttatggtcccaccgagaccaccatctggtcggcggcccatcgtctgcatgacgcacaaccatttgtcgggcggcctatcgccaacaccacgttgtttatcctcaatgccgggttgacaccgagcccggtgggcgctgccggtgaactgctgatcggcggtgtcggcctggcccgtggttaccacgagcgccccgcgctgacggccgagcgctttgtgcccaacccgtatggtgcgccaggagaacgcctgtaccgcactggcgacctggcccgctaccgtgccgatggcgtggtggaatacatcggccgcgtcgaccatcaggtcaaggtgcgtggcttccgcatcgaactcggtgaaatcgaagcctgcctgcgcgagcatgccggcgtgcgcgaggccgtggtcctggccgataacgaccgcttgatcgcttacctggtcagctcggtacccgacacggtagaagcctacaaggcggccctgcgcgagcgcctgccggactacatggtgccggcgcacctggtgttcctcgacagcctgcccctgacccccaacggcaagctcgaccgtaaggctttgcctgcggtggacgcggcacagttgagcaatggccatgtggcgccagtgacactgcgtgagcagcaggtcgcggcgatctgggccgaggtgctggagctgccgcaggtcggccttgacgatcacttcttcgagctcggcgggcattcgctgctggccacccgtgttgtctcgcgggttcgccaggtgctggcactggaagtggcactcaagaccctgttcgaacacccgcggttggaggatttcgttcaggcgctgggcgaggagggcgtggttgcacccgcgttgctcaaggctgaccgcaatcaaccgctgccgttgtcctatgcccaggagcgccaatggttcctctggcaactggacccgcaaagcacggcgtatcacatccccagcgcattacgtttgaaagggctgctcgacctgcctgctctgcaatgcagtttcgacaccttgctggcacgccatgaaagcctgcgcacccatgtgcgccaggacgctggcggcgcggtacaggtgattgaagactcgggcctgatcgagatcagcctgcttgacaccgaggaagatggcctgaaagcgcgggtcgcagaagtggttgcgcagccattcgacctgctgcgcgggccgctgttgcgggcccagttgctgcgcctggctgttgatgaccacgtactggtgctggtgcagcaccacatcgtctccgatggctggtcgatgcaattgatggtcgaggaactggtgcagttgtacgccaccttcaaccagggccggatgcccgacttgccagccttgccgatccagtacgccgattacgccctgtggcagcgcaactggatggaagccggtgagaaggcccgtcaactggcgtactggcaggctcagctgggtggcgtacagccggtgctggagctgcctttcgactacttgcgcccggcagtacaaagccagcgtggcgcgcgcctgggcattgagttgcaacctctgctgctgagcggtctgcgtcagttggcgcagagcgtcggagtcaccttgccgatggtactgctggcgtcctaccaggcgctgctgcaccgctacagcggccaggaagacgtgcgcgtcggcgtgccgattgccaaccgcaatcgcctggaaaccgaagggctgatcggcttcttcgtcaacacccaggtgctcaaggctgatatccatgggcagatgagtgtggtgcaactgttgcggcaggtgcgccagcgttccctggaagcacaggcccatcaggacctgccgttcgagcaactggtcgaagccttgcagcccgagcgcagcatgagcctgagcccgctgttccaagtgctgttcaaccatcgcgtgacctcggccgccaatcatttgcagcggctcgccgaactggatgtcgaggtgctgagctgggatgaaggtgtggcgcagttcgacctggcgctggatgtggaggaaagccaggcgacgctgcgtgcgtccctgagttatgccaccgacctgttcgccccggcgaccatcgaacgaatggccggccactggcagaacctgttgcaggcgatggtcgccgatcaacagcaacccatcagccaactgaacctgttgggcgaggacgagcgacagcacatcctgcaattgtggaacgagaccgacgcgggcttctcggccgagcgtctggttcaccaattggtggccgaccgcgcccgggaaaacccggatgcagtcgccgttaaattcgacgcgcaaaccctgacctacggtgaactggacagccaggccaaccgcctggcccatgcgctgatcgcccgtggcgtcggcccggaagtgcgcgtggcgattgccatgccgcgcagtgccgaaatcatggtggcgttcctggcggtgatgaaggccggtggcgtttatgtgccgctggacgtggaatacccgcgtgatcgcctgctgtacatgatgcaggacagccgtgcccagttgctgctgagccacagcagtgccttgcagcaactgccgattccagatggcctggacagcctggcgattgatcgcaccgaggagtgggtaggcttcagcgacactgaccctcaagtgaagctggacggtgacaacctggcctacgtgatctacacctccggctccaccggcctgcccaagggcgtggcggtatcccacggtccactggtagcccatatcatcgccaccggcgagcgttatgaaacctcgcccgccgattgcgaactgcacttcatgtcgttcgccttcgacggctcccatgaaggctggatgcacccgctgatcaacggcgccagtgtgttgatccgcgatgacaacttgtggctgccggaatacacctaccagcaaatgcaccgccacaacgtgaccatggcggtgttcccaccggtttatctgcaacagttggccgaacatgccgagcgtgacggcaacccgccgaaggttcgtgtgtactgcttcggtggtgatgccgtagcccaagccagctacgacctggcctggcgcgcactcaagccgacctatctgttcaacggctacggcccgacggaaacggtggtcacgccattgctgtggaaagcgcgcaagggcgacccatgcggcgcggtctacgccccgattggcacattgctgggcaatcgcaatggctacgtgctggactcgcaactcaacctgcaacccatcggcgtagccggcgagttgtacctgggcggcgagggtgtggcgcggggttacctggaacgcccggcactgactgccgaacgcttcgtgccggacccgttcggcaaacccggcagccgtgcctaccgcagcggcgacctgacccgtggccgcccggatggcgtggtggattacctggggcgtgtcgaccatcaggtgaagatccgaggtttccgtatcgagctgggcgaaatcgaagcacgcctgcgagagcaggacaacgtcggcgaaaccgtggtggtggcccaggacggtccgaccggcaagcagttggtggcttatgtagtgcccgcagacggcagcctgattaacgaaaccgagttgcgcgacaccctgcgtcgcgccctgaagacccgcctgccggactacatggtgccgacgcatttcatgttcctggcacagatgccgctgacccccaacggcaagctcgaccgcaagggcctgcccgagccggatgcgagcctgttgcagcaggcctatgtggctcccgaaaccgagcttgagcagcagatcgccgtgatctgggccgatgtgctgcgcctgccgcaagtgggcctgaacgacaacttcttcgaggtcggcggccattccctgttggcgatccagatcacctcgcgggtccaggccgagctgggcctggaagtgccgctggtggaagtgttccagaccgaaacgctgcgtgcctacgtgcaggccgccgccaccttccgcgccggcagcgcggaagattttgatgatcttcgtgactttttgagcgaactagaggcgatttgacccatgctttccaaccctaatatcgatctggtttcgcgctttcttcgcttgcctctggaacagcgccagcagttttacctgcgcctgcaaagccggggcatgagcttcgctcaattgccaatcgcgtcgatccgcgaggacggccagcacctgccgctgtcctacgcccaggaacgccagtggtttctctggcagttggacccggacagcgacgcctaccacgtccccggcgccctgcgtctgagcggccagctggacaaggctgccctgcaacgcagtttcgacacgctggtggcccgccacgcaagcctgcgcacgcgcctgcacctgaacggtgagcagcgtgcccaggaagtactggagcatggggtgatcgagatcgccgagcatgccgtcgacgaaacacagctcaaggcatgggtcgaggccgagatcgccggtccgttcgacctgcagcacggcccgttgctgcgggtcagcttgctcgccgtgagcgaagcggaacacgtgctggtgctggtgcagcaccatatcgtctccgatggctggtcgatgggcgtgatggtgcaggagttgatgcagctctatgccgcctacagccagggccaggactgcgcgttggcgccgttgccgatccagtacgccgactatgccctgtggcagcgcagttggatggaggcgggggagaaggcgcgccaactggaatattggcgtgaattgctcagcggcacgcaaccggtactggaattgccgttcgaccagccgcgccccgcgcaacagagcttccgcggggcgcgccaggacatcacgctggagccggcactggtcgccgggttgaaggcgctggcccagcgggaaggcgtgacgatgttcatgctgctgttggcctcgttccaggcatttttgttccgctacagcggccagccggatattcgtgtcggtgtgccgattgccaaccgcaaccgcgtcgagaccgaatcgctgattggctttttcgtcaacacccaggtgctcaaggccgacctcgatggccagataagctttgcccaattgctgcaacacaccaagcgccgcgcgctggaagcccaggcccatcaggacttgccctttgaacagttggtagaagcgctgcaaccggagcgcagcctgagccataacccgctgttccaggtgatgttcaaccatcaggcccattctccggccgtggcacagcagctaccggggctgcgcgtggccaacctggaatgggacagtcacagtgcccagttcgacctgagcctggacacccaggagagcggcgacgggatctgggcgtccctgacctacgccaccgacctgttcggcgccgccaccgtagcgcgtatggccgagcactggctgagcctgctgcgtgccgccgtggcagacaccgcgttgccgttgcaggacctggcgaccctcaacgcccaagagcgcgagcagatcctcgtcgagtggaacgccaccgagcgcgactacccgcaagggcagtgggtgcatcagttgatcgaagcccaggcgctggcgcagccggatgcgccggcgttgcgcttcaacgatatcgccctgagttatgccgaactcaaccgccgtgccaaccgcctggcgcatcgcctgatcgaagctggggtaggtccggacgtgctggtgggcctggcggtagaacgctccatcgacatggtggtgggcttgctcgcggtgctcaaggctggtggtgcctatgtgccgctggaccctgagtacccgcgtgagcgcctggcctacatgctggacgacagtggcgtgaaactgctgctgacccaggcgcatttgcgtgaacagttgccgattcctcaggggctggaaaccctggtgctgggcgagtctgtattcgagcactacagcgacgccaacccaggcatcacgctggacggcgaaaacctcgcctacgtgatctatacctcgggctccaccggtcaaccgaaaggggcgggcaaccgtcattcggcgttgctcaaccgcctgcaatggatgcaggaagcctatggcctggaggtcagcgatacggtgctgcaaaagacgccgttcagcttcgacgtatcggtgtgggagttcttctggcctttgatgaccggtgcgcgcctggtggtggcagcgccgggggatcatcgggatccggccaggctgatcaacctgatcaatcagcagcaggtcaccacgctgcactttgtgccgtcgatgctgcaggcgttccttcaggacccggcggtgtccacctgccaaagcctgcaacgcatcgtgtgcagcggcgaagccttgccggtggatgcccagcagcaagtcttcgccaagctgccgcaagccgggctctacaacctgtacggcccgaccgaggctgccatcgacgtgacccactggacctgcgtcgacgaaggccgtgacgccgtaccgattggccgtccgattgccaaccttggttgctacatcctcgacagcaatttcgaaccggtgccggtcggcgtgctcggcgagctgtacttgggcggcatcggcctggcccgtggttaccaccgtcgtccttccctgactgccgagcgttttatcgcgcatccgtttgtcaaaggcgaacgcctgtaccgtaccggagacctggcgcgttatcgcgcagacggcgtgatcgaatacgccgggcgcatcgaccaccaagtcaagctgcgcggtctgcgtatcgaactgggtgaaatcgaagcgcgcctgctggaacacgaatgggtccgcgaaaccgccgtgctggcggtggagggcaaatgcctggtgggctacctggtgctgcaaaacgccggcgatgactggcgcgatgtgctggccgcccacttgggccagcacctgccggactacatggtcccggcccaatgggtgctgctggaacagatgccgctgagccccaacggcaagctggaccgcaaggccctgcccaagcccgcatccacccagcactacgaagcgccgcagagtgcgctggagcagcagatcgcagcgatctgggccgaggtgctcggcgtcgagcaagtcggcttgaacgacaacttctttgagcgcggcggtgactcgatcatctccattcaagtggtcagccgtgcccgtgccgccggtatccacttcaccgccaaggcgctgttccagcaccagacggtgcgcagcctggcccgcgtggcgcaattacagaccgcgcaagtgatcgaccagggcccggtgcagggcgcgactccgttgctgccgttccagcaactgttcttcgagatggacttgccggaccgccatcactggaaccagtccttgctgctgacgccgcgccagccgctgcttgccgagccactggagacggcgttgcaggcactcacccagcaccacgatgtgctgcgcctgagcttcaccccacaggccgaaggctggaccgcacgccacgacgcgccagctgccaccctgctttggcaggccagcgtggaggatgcggccgaactgcatgccctgtgcgagcgcgcccagcgcagcctcgacctgcaacaaggccaactgctgcgtgcagtgctcgccgagatggccgacggttcccagcgcctgttgctagtcatgcatcatctggtagtggacggcgtgtcctggcgcgtgttcctcgaggacctgcaaagcctgtatcgccagcggcgcttgccggccaagacttcgtcgttcaaagcctgggccgagcgtttgcaggcccatgcccgcagcgaagcggtcgcgccggaaaaagccttctggcggcaacagctccagggcgtgtcgaccgacttgccctgccgcgatccgcagggcgcgcgtcccgggcgcctggcccagaccgtggtcagccaactggatgccgagcgcacccggcaactgctgcaacaggcgcccacggcctaccgcacccaaatcaacgacctgctgctgaccgccctggcacgtgtcatctgccagtggaccgggcaggcttcgagcctgatccaactggaaggccatggccgcgaagacctgttcgacgacatcgacctgactcgcaccctgggctggttcaccagcctgttcccggtgcgccttaccccggccgactccctggcgacctcgatcaagcagatcaaggaacaactgcgcgccgtgccggacaagggcctgggcttcggtgcgctgcgctacctgggcgacgacgccacgcgccaggtgttcggccagttgccggtgccgcgcattaccttcaactacctgggccagatcgatggcagctttgatcagccggacgctttgttcgtaccggcggcggagagcaccggtgccgagcagagcccggaggcaccgctgggtaactggttgacgttgaacggccaggtatacggcggcgagctgcacatgggctggaccttcagcccgctgatgttcgaccctgcgcagatcgaagccttgagccaggcgtttacccgtgaactgactgcattggtcgagcattgctgcgcgcctggcaaccacggcgtgaccgtctctgacttcccgttgtcgcgcctcacccagccgcagctggaatccctgccgctggccgccgatgccatcgaagacctctacaccctgtcgcccatgcagcagggcatgctgttccacaccctctacgagcaagcagccggcgactacatcaaccagatccgcgtgaccgccgagggcctggatgtggcgcggttccagcaggcctgggacgccacggtgcaagcccatgacgtgttgcgcagcggcttcttctgggaaggccagctggaatggccgtgccaggtggtgtaccgcgaagcccgactgccgattgaacacctcgactggcgcgccatgccagaacgcgaactggaattgcacaacctgcagcaagcccagcgccgccagggctttgacctggccaaggcgccgctggtgcgcctggtactggtacgcaccgacgagcaacgccatgagctgatctacacgaaccatcacatcctgatggacggctggagcaactcgcgcctgttcggcgaagtgctgcaacgctacgctggcgtggcggtgccgccagcggcggggcgctatcgcgactacatcggctggttgcagcagcgtgatgccgctgccaccgaaaccttctggcgcgaacagttgggcacgctgcaagcacccactcgcctgggcagcagccagccgctggcggcagacgggcacggcgagcacccactgagcctggatcgcgctcagactgaacgtctcgaggcctttgcacgccacaacaaagtgacgctcaacacgcttatccaggccgcatggctgatcctgttgcagcgccatagcgggcagtcggtggtggccttcggcgccacggtggccgggcgcccggcggagcttgtgggggtggagcagcagatcgggctgttcatcaacaccttgccagtgatcagcgccgtagatgaccagcagagcgtggcggcctggttgcaagcggtacaggaccgcaacctggccctgcgcgagcatgaacacaccgggctgtacgacattcagcgctgggccgggcagggcggtgaagccctgttcgacaatatcctggtgttcgagaactacccggtgtccaaggccctggaacaaaacggtggcagcggtatccgttttggcctgccggaatcccgcgaacagaccaacttcccgctgacggtgctggtggacgtcggcgatacgttgtcggtgcagttcagctttgcgcgtgcgcatttcgatgcaagcacggtacacacctatggacgtcacctggtcaatctgctgcacgccatgcttgagggtggccagcaacgtctgggcgacctggcgatgctcgatacggctgaacgtcagcaggtgcttcaggattggaacgccacggcgcgggactacccgttgcagcagggcgtgcatcagttgatcgaagaacaggtggcgcgcacgccgcatgccgcggcgctggtgtttgccgggcagcgcttgagctatatcgaactgaaccgtcgcgccaaccgcttggcccatcgcctgatggaagccggggtaggcccggacgtgctggtgggcctggccgtggagcgctccattgaaatggtggtgggcctgctggcggtgctcaaggccggtggcgcctatgtgccgctcgacccggaatacccgcgtgagcgcctggcctacatgctggacgacagtggcgtgaaactgctgctgactcaggcgcacttgcgtgaacagttgccgatccctcaggggctggaaaccctggtgctgggtgagtcgacctttgaagcctacagcgacgccaacccaggcatcgcgctggatggcgaaaacctcgcctacgtgatctacacctcgggttccaccggccaacccaaaggcgccggtaaccggcattcagccctggccaaccgtctgcactggatgcaggaagcctatgggctggaggtcagcgataccgtgctgcaaaagaccccgttcagcttcgacgtatcggtgtgggagttcttctggccgctgatgaccggcgcgcgcctggtggtggcagcgccgggcgatcaccgcgatccggccaggctgatcaacctgatcaatcaagagcaggtcaccacgctgcactttgtaccgtcgatgctgcaggcgttcctgcaagacccgaaggtcgcaacctgccacaccttgcatcgcattgtttgcagcggtgaagccttgccggtggatgcccagcagcaagtcttcgccaagctgccgcaagccgggctctacaacttgtacggcccgaccgaagccgccatcgacgtgacccattggacctgcgtcgatgaaggccgcgatgccgtgccgattggacgcccgattgccaacctcggatgctacctcctcgacagcaacttcgagccggtgccggtgggtgtgttgggcgagctgtacctcggtgggattggtctggcccgtggttaccaccgccgcccggcgctgaccgccgaacgttttgtcgcccatcccttcatcaagggcgagcgcctgtaccgcaccggtgacctggcccgctatcgccctgacggcgtgatcgaatacgccgggcgcatcgaccatcaggtcaaactgcgcggcctgcgcatcgagctgggtgaaatcgaagcgcgcctgctggaacacgattgggtccgtgaaaccgccgtactggcggtggacggcaagcacttggtgggctacctggtgttgcaagacgccggcgacgattggcgcgatgtgctgagcgctcacctggcgcaacagctgccggactacatggtgccggcccagtggatgctgctggagcagatgcccctgagccccaacggcaagctggaccgcaaagcgctgccgaaggtcgacgccaacctgcaagcccgcgaatacctggccccgcacagcgaactggaacaacagattgccgcgatctgggccgaggtgctggacgttgagcgtgtggggctaaacgacaacttcttcgaactgggcgggcattccctgctggccacccaggtggtggtgcgcctgcgcgagcaattgcacgcggagttcgacgtcaaatcgatcttcaccaccccgaccctggccgatttcagtgcctatgtggcggcccggcagacaaataattcgccggtgcaggacgcattggctaaatccttggaggccctcaaacgtctatcagcagaagatttggataaattgatttcctgaggggcgtggcgtgcaagcattaatcgagtcggtagggtcactttcggcgcaacagaagaaagcgttggcggtaatgctcaagcagcaaggcatcaacctgtttgagatagccccggttttcaagcgtcaggacggtgagcctcttcgactctcttatgcccaggagcggcaatggtttctgtggcaactggagccgcagagcaccgcttatcacgtgcccagggccctgcgcctgagcgggcccttggacgtggccgcattgcagcgcagctttgacacgctgatgatgcgtcatgaaagcctgcgcacgcatttgcaggaggacggcgacagtgccttgcaggtgattgccgagcaggcgcgggtgcagatcgccgtggtcgacgcccgggagtcgcagctcaaggacctggtggaagcgcaaattgcccagccgtttgacttgcagcaaggcccgctgttgcgagtcaagctgctgcgcctggcgcctgaggaacatgtgctggtgctggtccagcatcacatcgtgtctgatggctggtcgatgcaggtgatggtcgacgagctggtccagctctacgcggcccatgtgcagggccaggacctgcaattgccggccttgccgattcaatatgccgactatgcgctgtggcaacgcagctggatggaggcgggggagcgtgaacgccaactgggctactggaccggcatgctcggtggcgagcaaccggtactggaaatgccgatggaccgaccgcgaccggcggtgcagagctaccggggtgcacggctcgacctgacgctcgaagcgtcgctggtggcgggcctcaagcgcctggcgcagcgcgaaggcgtgacggtgttcatgttgttgctggcgtcgttccaggccgtgttgcatcgctacagcggccagggtgatatccgcatcggcgtgccggtggccaaccgtaaccgggtggaaaccgagcgcctgatcggctttttcgtcaatacgcagattctcaaggccgatatcgacggccagatgaccttccatgaactgctgcaacaaacccgccagcgctcggtagaagcccaggcgcatcaagacttgccctttgagcaactggtggaagcgctgcagccggaacgcagcctgagctacaacccgttgttccaggtgatgttcaaccaccagaccgatacccagcgcagcggcggcagcgtcaccggcctgcacgtgcaggggctggaatgggagagcaagaccgcgcagttcgacctcaacctcgacacccaggaatcggctgagggcatccaggcgtcgttgacctacgccactgacctgtttgacgcgccgggccttgagcgcttgctcgcgcactggcaccgtttgttgcaacaggtggtgcaggattgcaacgtccgcgtcggcgagctgccgttgctggacgatgcgcaatggcagcaactggtgcacacctggaacaacacgcatcaggtgttcccccaggatgtcggggtgcaccgcctgctggaagcccaggcacaggcccgtccggacgcgacagcgctggtctgcaacggccagtctttgagctacgcagaactgaacctgcgcgccaaccgcctggcccatcgcctgcgcgcggccggtgtcggcccggatgtgctggtggccgtggcgctggagcgttcggtggacatggtgctggccttgctggccacgctcaaggcgggcggcgcctatgtgccgctcgacccgcagtttccggccgaccgcctggcgttcatgctcgaagacagccgcgcacgtgtgctgttgaccgccggtgacctgcacgagcgcctgccgctggcagccgatcaacaggtgctgttcatcagtgaacaggaggacgcccgttacagcagtgacaacccgcaggtcgcgctgaccgatgagcacctggcgtatgtgatctacacctccggctccaccggcaagcccaagggtgtgatggtgcgccatggcgccctgagcagctttacccagggcatggccgacacgttgagcatcgacgccaaggcgcggttgctgtcgttgaccaccttctccttcgatattttcgcccttgaactttatgtccccctggcggtgggcggcacggtcgtggtggcggacaagcctgtttcccaggaccccgaagccatcctgagcctgctgcatgaacaggcgatcacggtcgtgcaagccacgccctcgacctggcgcatgctgctcgacagcgagcgccgtgccgtgctgcacgggatcaagtgcctgtgcggcggcgaagcgctgccggccgacctggccgagcgcatgctggcccagcagggcacggtgtggaacctgtacggcccgacggaaaccaccatctggtcggcggcccacccattggttgaaccgttgccgtttgtcggtcgcccaattgccaacacatcgctgtttatcctcaatgccgaactcgctccgacaccggtcggcgtcagcggcgaactgctgatcggcggtgtcggcctggcccggggttatcacggtcgtgctgcgctgaccgccgagcgcttcgtacccaacccctttgcacacaacggtgagcggctgtaccgcaccggcgacctggcgcgttatcgcgtggatggtgtggtcgagtacatcggccgcgtcgaccatcaggtcaaggtgcgcgggttccgtatcgagttgggggaaattgaggcgtgcctgcgtgagcagagcgctgtccgtgaagcggtggtggtggccgagaatgaccagctcctggcgtatctggtgacgcacgccgtgacatcggaaaccgatcagggcaccctgcgcgagacgttcaagaccgcgctgcgcgcggtgttgccggactatatggtgccggcgcatatgctgttcctggcgcgcctgccgttgacgcccaacggcaagctggaccgcaaggcgctgccgaagccggacgccagcctgctgcaaaaacgctatgtggcaccggtcggcgagaaggcgcaacaagtggccgcgatctgggccgaagtgttgggggtgccacaggttggccttgaagatcatttcttcgagctgggcggtcactccttgctggcgacacgtgtcgtgtcgcgggtacgccaggcattggcgatcgacgtagcgctcaagagcctgtttgaacaaccggttttgggggcgtttgtacaggcgctgggtgaaaagggcgccgatgttgcgcacattagcttggctgaccgcgaacaacccttgctgctttcctatgctcaagagcgccagtggttcctctggcagcttgaaccggacagtgcggcttatcacattccggccgcgttgcgcctggtgggtgcgctggatcgcaacgccctgcaaagggccttcgatactctggtgcagcgccatgaaacgctgcgtacggtgttttttgccgatacgcaccagactgtccagcgtgtgatcgagcaagtcgcgccggtcatcgactatcaagtgcttggctcgactgagccggcccggttgcaggcgatggtagaagacgaaatcgccaggccattcgacctgcagtccgggccattgctgcgcatcaagctgctgcaactgagcgaacgcgagcatgtgttggtcatggtgcagcaccatatcgtctcggatgcctggtcgatgcaagtgatggtcgatgagctggtgagcttgtatgcaggctacagccagggccttgagcccacccttgcaccgttgccgattcagtacgccgactatgcccagtggcagcgcagctggatggaggcgggtgaaaaggagcgccagctggcctactggcgtgcgcgcctgggagatgtgcaaccggtgctggagttgccgctggatcggccgcgtccggccatgcagaactatcagggggcacgcctggacctggtgctggagtcgtcggtggtcgagggcttgcgcgcccttgcacagcgcgaaggcgtgacgatgttcatgctgttgctagcgtccttccaggcactgttgtaccgctacaccggccagtcggacatccgcgttggcgtgccgatcgccaaccgcaaccgtctggaaaccgagcagttgatcggctttttcgtcaatacccaggtgctcaaggccgagattgacgggcacatgacctttgcccaactgctgcaacaggtcaaggaacaggcgctgggcgcgcaggcccaccaggacctgccattcgagcagttggtcgaagccttgcaacctgagcgcagcctgagccacaacccgttgttccaggtaatgttcaaccaccagtcggctgcgcaagcccatcgcgatggccagcaactacctggcctgcgtgtggaagggttgacgtgggacagtcacacggcgcatttcggcctgagcctggacaccgaagagtctggtgaggggctgctggcttcgctgacttacgccaccgcactgttcgacgcgagcaccctgcagcgcttcgccgcccattggcagaacttgctcaagcgtgtggcgggcaatgcccagcagtgtgtcgccgacttgccgatcctgggcagagatgaacaagcgcagatgctgtacgcgtggaacccgccgcaaccgtcgcgtgccgcccatggcagcgtgctgcaaaagttcgaacaacaggtggccagccagccccaggctatcgccttgatcatggatcagcggcgcatgacctacgccgacctcaacctgcgggccaaccgcttggcccatgcactgatcgagcagggcgtgggcgccgacagcctggtcggcgtggccgtggaccgttcgctggagatgatcgttgcgctgttggcggtgctcaaggccggtggcgcctatgtcccgctggacccgcaatacccccaggaccgcctgcaatgcatgatcgaagacagcggcctgcaactgttgctgacccagcagccgctgctggagcgcttgccgatcagccctggcctgacgttgatttgcctggaagagggtgcggactggctggccgagtacccgggcagcaatcctgagatacgggcgttccccgcgaacctggcgtacctgatgttcacctccggctccaccgggcggcccaagggcgtcggtatcgatcaggcctcactggcacggcatgtcgaggtgtttatcgagctgttcgaactgactgcggctgaccgtgtgttgcagttcggtacgttcaacttcgacgggtttgtcgaacagctgtatccggcgctgtgctgcggtgccgccgtggtggtgcgcggcggtgagttgtgggacagcgacaccttctatgcgcaactgatcgaacatgacatttcggtggttgacctgaccaccgcctattggcacctgatcgctcgtgactttgccgagcgcggtgtgcgcgattacggccgcctgcgccaggtgcatgccggtggtgaggcgatgccaccggaagggctggcctcctggcgtgatgccgggctgggccacgtgcgcctgctcaacacctacggccccaccgaagcgaccgtcacggtgaccgctctggattgcgccggttacgtggagggtcgcgagaccgttacgcagatgatgccgattggtcgcgtgctggacggccgtgcgatttacctgttggatgccggcctgaacccggtgcccgtgggcgtggcgggtgaattggtgatcggcgggccgctgctggcacggggttacttcaaccgcgccgcgctgaccgccgaacggtttatccccgaccccttcgacccgctcgggggagggcgtctgtaccgtaccggcgacctggcccgttaccgcgccgatggcgtgatcgagtatatcggtcgcatcgaccaccaggtcaaggtacgtggcttccgtatcgagctgggcgagatcgaatcgcgcctgctggcacaggacgacgtgcgcgaagcgttggtgatcgctgccgaccagcaactgatcgcctacctcgtcaccccattgacggaagccgagcagcctggcttgcgtgagcgtattcgtggcgtgttgcgcgatgagctaccggactacatggtgccggcacatttcatgtttctggagcgcctgccgctgagccccaacggcaagctggaccggcatgccctgccgcgcccggaagcgactcaggcgactgagcagtgggtggcccccatcagtgcgctggagcagcaggtcgcggcgatctgggcagatattctcggcgccgagcgtatcggtttgaacgaccatttctttgaactcggcgggcattcgttgctggccatgcaagtggcttcacgcctgcggcataacctggggatcgagttacccttgcgtgtgctgttcgaacaaccgcgcctgcaggggtttgtggccgcgctgcacaccgagggcaagcgcggcggttcgacggcgccggcgttggttcccgcgtctcgcgagctgccgttggtgttgtcctacgcccaggaacgccagtggttcctctggttgctcgaccccgagagcactgcctaccacgtgcccagcgctttgcgcctcaagggccgtttggacctgaacgcgctgcagcgcagtttcgatgcgttggtggcgcgccatgaaagcctgcgtacccatctgcatcagggcgatgagcagaccgtgcaggtgatcctgccgcaggcgcgtgtcgagattgcattgcgtcagagcgatgaagcgcaggtcaaggcgcaggtcgaagccgagatcgcccggccgttcgacctgcaagcggggccgttgctgcgggctacgctgttgcgcctgagcgacgacgagcatgtgttggtgctggtccagcaccatatcgtctcggacggttggtcgatgcagatcatggtcgatgaactggtgcaactgtacagcgcctacagtcagggcctggaggtgcagttgccggccttgccgatccagtacgctgattacgcccgttggcagcgcgagtggatggacgccggcgagaaggaccggcaactgggctactggcaggcgttgctcggtggcgagcaaccggtgctcgaactgccgttcgaccaccagcgcccggctgagcaaagccatcgcggtgcgcgcctgtttgtagaattgccgccggccttggtcgccgacctcaaaggcctggcacagcgcgaaggcgtgacgatgttcatgctgttgctggcctcgttccaggcgttgatgcatcgctacagcggccaggaagacgtgcgcgtgggcgtgcctattgccaaccgcaaccgagttgaaaccgagcggttgctgggctttttcgtcaatacccaggtgctcaaggccgatatcgacgagcagacctcagtgctgcaactgttgcagcaggcccgccgccgtgcgctggaagcccaggaccatcaggatctgccgttcgagcaactggtggaggcactgcaacccgagcgcagcctgagcctcaacccgctgttccaggtgatgttcaaccatcaaaccgaagcacgtctgggcgcaaccgagcatcaactgtccaccttgcgtgtcgaaggcatggaatgggcaagccagaccgcgcacttcgacctggacctggacgtgcatgaaggcactgacggtatctgggccaccctgggttatgccaccgatctgttcaatgcctccaccatcgagcgcatggcgcggcattggcagaacctgctgcaagcgatggttgccgaccaacagcaacccatcagccaactgaacctgttgggcgaggacgagcgacggcacatcctgcagctgtggaaccagaccgatgccggcttctcggccgagcgcctggtgcacgagcgagtggccgaccgggcccgcgaaacccccgatgccgtggcagtgaagttcgacgcacagaccctgacctacggcgaactggacagccaggccaaccgcctggcccatgcgctgatcgcccgtggcgtcggcccggaagtgcgcgtggcgattgccatgccgcgcagtgccgaaatcatggtggcgttccttgctgtgatgaaagccggtggcgtctacgtgccgctggatatcgaatacccgcgagatcgcctgctgtacatgatgcaggacagccgtgcccagttgctgctgacccacaccagcgcgttgcaacaactgcctattcccgagggtctggacagcctggcgattgatcgcaccgaggaatggtccggttacagcgacacggcgcctgatgtgaaactggacggcgacaacctggcctacgtgatctacacctccggctccaccggcctgcccaagggcgtggcggtatcccacggtccgctggtggctcacatcatcgccaccggcgagcgttatgaaacctcgcccgccgattgcgaactacacttcatgtcgtttgccttcgacggctcccatgaaggctggatgcacccgttgatcaacggtgccagcgtgctgatccgcgatgacagcctgtggctgccggaatacacctaccagcaaatgcatcgccacaacgtgaccatggcggtgttcccgccggtttatctgcagcagttggccgagcatgccgagcgtgacggcaacccgccgaaggtgcgcgtgtactgcttcggtggcgatgccgtagcccaagccagctacgacctggcctggcgcgcactcaagccgacctatctgttcaacggctacggcccgacggaaacggtggtcacgccactgctgtggaaagcgcgcaagggcgacccatgcggcgcggtctacgccccgattggcacattgctgggcaatcgcaatggctacgtgctggactcgcaactcaacctgcaacctatcggcgtggctggcgagttgtacctgggcggcgaaggcgtggcccgtgggtatctggaacgtccggcactgaccgccgaacgcttcgtgccggacccgtttggcaaacctggcagccgtgcctaccgcagcggcgacctgacccgtggccgcccggatggcgtggtggattacctggggcgcgtcgaccatcaggtgaagatccgaggcttccgtatcgagctgggcgaaatcgaagcgcgtctgcgcgaacaggacaacgtcggtgaaaccgtcgtagtcgcccaggacggcccggccggcaagcagttggtagcttatgtggtgcccgcagatgccagcctggccaacgaagccgagttgcgcgaaaccttgcgccgcgccttgaaaacccgtctaccggactacatggtgccggcgtacttcatgttcctggcgcaaatgccgctgacccctaacggcaagctggaccgcaagggcctgccgcagccggacgccagcctgttgcaacaggcctacgtggcaccgcagagcgagttggaacaacaactcgcggcgatctgggccgacgtgctgcgcttgccgcaagtgggcctgaacgataacttcttcgagctgggcggtgattcaatcatctcaatccaggtggtgagccgtgcgcggcaggccggaatccgctttacgcccaaggacctgttccagcaccagaccgtacaaagcctggccggtgtggcacgccagggggacgacgggttgacgattgatcaggcggccttgagtggcgaaacgttgctgctgccgatccagcaggctttctttgccgatgagattgccgagcgtcaccactggaatcagtcggtggtgctcaaagcccatgagccccttgacgctggcctgcttacccaggccttgcaggcgctgatcgtgcatcacgatgcgctgcgttcccggtttgtcgagggcacggacggctggcagggtatgtatcgcgccgccgagcaccaccaggccgatgccgtgctgtggcaaagcgtgctgcacgatatcgaagagctggctgttttgggtgaggaggcgcaacgcagcctcgacctcgaccagggcccgttgatgcgtgcggtgctggttcaattgcacgatggtacgcaacgcttgctgctggttatccaccacctggtggtggatggcgtgtcatggcggatcctccttgaggacctgcaaacggcctatcgccaactcgccagtggcgccaaggtggcgttgcccgccaagaccagttcgacccgcgactgggcgcagcggcttcagcgatatgccaaaggcgacgcactgacccgggaactggcatggtggcaagcccaattgcacggcgccgaatctgacctgccgggcgccaatccgcaggcgagcttgagcaaccggcatgccggcagtgcgatcacgcacctggacgccgctcacacgcgccgcctgttgcaggatgcacctgccgcctaccgcacccagatcaacgacctgctgctgacggcgctggcgcgggtaatcgggcgctggaccggccacgattccaccctgatccgcctcgaaggccatggccgcgaagacctgttcgaggagatcgacctgacccgcacggtcggctggttcaccagcatttacccggtcaaactcacgccggctgcaaccctggctggctcattgaaggggatcaaggaacaactgcgcgccattcccgacaagggcatcggttttggtgccttgcgctacctgggccagcccgaggtacgcgatgcattggcagacttgccgcagccgcgcattaccttcaactacctgggccagttcgatgcgagttttgatagccctgaacacgaggggctgtttgcgccgtccggtgacgctgccggcaacgatcagagcccggacgcatcgctgggcaactggttggaaatcaatggccaggtgtacggcggcgagctgaacctgaactggggattcagccagcagatgttcgatcccgcttgcatccagcagttggccgatgactacgccgaagagctcaaggcgttgatcaagcactgctgccagcccggacaggccggcgccacgccgtcggacttcccgctggcgcgcttgaaccaggcgcagttggatggcttggggttgccgttgaaccaggtcgaagacctttacccgctgtcgccgatgcaacagggcatgctgttccaatcgctgtttggccagggctcgggcgactacatcaaccaaatgcgcgttgaggtgcaaggattggatgtggcgcgtttccgcgcagcctggcaggtcgcgctggagcaccacgatatcttgcggaccggtttcctctggcagaccgagttggagcagccgttgcaagtggtgtaccggacggcgcaggtgccgtttgtcgagcacgattggcagcagcgcgcagacagtggcgaggcgtttgacgcgttggcgcataccctgcgagccgatggttttgtgctggaacaggcgcccttgctgaacctgatggtggtccgtaccggtcccgacagccaccatttgatctacaccaaccaccatatcctgatggatggctggagtgcctcgcagctgttcggcgaggtgctgcaacagtatgccggcgagtcggtgcgcgcacccagtgggcgctaccgggattacatcggttggttgcaggcccaggacccgttcaccagcgagaccttctggaaagcccagttggccggtttgcaggagcccacgcgcctttcccgtggcatcacccatgagtcgggtgtgccccaggccaatggcgttcatcacctgacgctggagcagacggcgaccgaacagctcaaggctttcgcccagcgccacaaggtgaccctcaatacgctggtgcaaagcgcctggctcttgctgttgcaacggcataccggccttgacacggtcgcgttcggcgccacggtcgcggggcgtccggccgagttggcgggtatcgagcagcaggtcgggttgttcatcaacacgctaccggtggtggccactccaagcccgcagttgagcgtcgacgcttggttgcagcaagtgcaggaacaaaacctgcgcctgcgtgaacaggagcacacgccgctgttcgagatccagcgttgggccgggcttggtggcgaggcgttgttcgacagcatcctggtgttcgagaactacccggtgtccgaagcgctggagcagggctcgccggcgggcctgcggttcggtgcgatggacagcctggaacagacccactatccactgaccgtgctgctgggcatcggtgacagcctggcggtggagttcaactacgctcacgccgccttcgacgcacaggacatcgtgcacctggcggaacatttccagcaattgctgcaagccttgacgctgccgcaggtggagcgcctggcggacttgccgtcgctgcccgccgcacagcgtcaacggatcgttgaggactggaacgcaacggcgcgtgagtacccgttgcagcgcggcgtgcatcagttgatcgaagagcaggtagccctgacaccagaagcaccggctttggtgtttggtgcacagcgcctgagctacgccgaactgaaccgtcgggccaaccgcttggcgcatcgcctgatcgaagctggggtaggtccggacgtgctggtgggcctggcggtcgagcgctccattgaaatggtggtcggcctgctcgcggtgctcaaggccggtggtgcctatgtgccgctggaccctgagtacccgcgtgaacgcctggcctacatgctggacgacagtggcgtgaaactgctgctgacccaggcgcatttgcgtgaacagttgccgattcctcaggggctggaaaccctggtgctgggcgagtctgtattcgagcactacagcgacgccaacccaggcatcacgctggacggcgaaaacctcgcctacgtgatctatacctcgggctccaccggccaacccaaaggcgccggtaaccggcattcagccctggccaaccgtctgcactggatgcaggaagcctatgggctggatgtcagcgacacggtgctgcaaaagactccattcagcttcgacgtatcggtgtgggaattcttctggccgctgatgaccggcgcgcgcctggtggtggcagcgccgggggatcatcgggatccggccaggctgatcaacctgatcaatcagcagcaggtcaccacgctgcactttgtgccgtcgatgctgcaggcgttccttcaggacccggcggtgtccacctgccaaagcctgcaacgcatcgtgtgcagcggcgaggcattgccggtggatgcccagcagcaagtcttcgccaagctaccgcaagccgggctctacaacctgtacggcccaactgaagcggccatcgacgtgacccactggacctgcgtcgatgaaggccgtgacgcggtaccgatcggcaaacccattgccaacctgggctgctacatcctcgacagcaacttcgaaccggtgccggtgggtgtgttgggcgagttgtacctcggagggatcggtctggcgcgtggttaccaccgccgtccggcactcaccgccgaacggtttgtcgcccatcccttcatcaagggggagcgcctgtaccgcaccggtgacctggcgcgctaccgcgaagacggcgtgatcgaatacgccgggcgcatcgaccatcaggtcaaactgcgcggcctgcgcatcgagctgggtgaaatcgaagcgcggctgctggagcatgcagcggtgcgtgaagcggcggtattggcggtagacggccaatacctggttggctacctggtcttgcaggagcaggatgcgcagtggcgtgaaaccctcagtgcccacctggccagccatttgccggactacatggtgccggcacaatggctgttgttggagcagatgcccctgagccccaacggtaagctggaccgcaaggcattgcctaagccggacactcagtcgacccagcgttttgaggcaccgcagaatgagctcgaacagaaaatcgccgcgatctggaccgatgtacttggcgtagagcaagttggggtgaacgacaacttcttcgagttgggtggtcattcgctgttggtattgatgctcaaggagcggattcgcaaggccagcagcatcgacctttctgtcagccagttgatgctcaacccgaccgtgcgtgcgcaagtcggttgcctgcaagggacggcacgtcgttcgctgctggtcccgctcaacggtcagaacacgggcacgcctgtctacctgttccaccccagctatggttcggtgcattgctacaaggctttggccctggcgttgcgtgagcagcggcctgtggtcggtgtgatttgtcgcgcattggccgaggagggtgcgcaagtgccgacctgggccagcatggtcgaggattacatcacgcagttactggaagctcagcccgaaggcgccttccgcctggccggctggtcgctgggcggcaacctcgcggtagaggttgcgcatggcctggagcaggcgggccggaacgtggagttcgtgggttggatcgactcggcccccccgcgttggctcactcagtattgggatgcggccgtcatcaccgatgagcgcgagatctccgataatgatcggcgcgtggccttgctcggtgtgatgttccctgcgtttgcagaggcgatccatcgcacctggcaggctttgcaagtggccgacgacacggcggatcagcaatgggcagggttcatcgaatgggctgaaaccaccttgggtgaagctttccgcgacattcagcaaacgctgttgggtggcaacgaggcacaggtttcctgggaggttgaccgcaccttgttcaagcgtatggagcaggctgacttcaagccactcaaggcgccggtgagttgctggtgggcggccatgagccgtgcgggccagcacaaggcgttgatcgaagacagtatggctcgggtgctcggccaggcggtggtgcggtcggtggagatcgatgtggaccacgaacggatcatcgacaatgccgagttcatacgcagctttgtgatggccatggagtaaccgtcgcttaaaccacaagccccggctcatgggtgtgagccggggcttttttgtggggcaaaggtgtgcacggcagaggcaccgtaccgcccataaaaaaacaccctgcgcaggtgttgcctgctcagggtgtcggggggtgccggtgtagggtcagaagtcccagcgggtcgaaaacatcacgttgcgtgggtcgccggcgtaggacgaggtgtagaacccgatgttggtgtagtagcgcttgtcgaacacgttattgacgttcaccgaggccgagaggtttttggtgatctggtagcgcgccattgcgtcaaccagccagtacgggtcttgggagaagcgctgggtcactctcttgccgcggttgtagacgtcctgccaggcctcgccctgccagcgggcgccgccgccgagggtcagtttgtcgagcgcgcccgtcagcttgtagctggtgtagaagttcagctggtcctgaggttcccaggtggagaacttcttgccgtcgtcatcgcggatcactttgtgggtgtagcccgcctgcacttgccagcccggcagcagttcacctgagatctcggcttcatagcccttggttgtggcctggacgcccttgtaggcccactcgacaggcgagttggccggcatattgttgttgtactcagtgtcttcctcggcacgattggactcatggatctcgaagtaggccaggctggcgttcaagcggccgtcgtagaactcacctttcaggccaatctcgtagttctcgccttcgtctggctcgaccatcttgttgttgcggtcgggccgcagttgttgcggcatgaagatcgaggtatagctgccgtacaccgagaaatttttgttcaggtcatacaccacacccgcatacgggatgagcttgccggtttcgcgcgaatcgttggtgccggtcaggcggtagtcggtcaggcgtgagccgagcaatacggacagatcatcggtgatgctcaggcgggtcgagaagtagacggcggcctggcgggtgatgtcgtctttttcgtgggcagggccccattgtggttcaaggctgtcaccgttccattcatagagcgggaaattgttgctgtctcgataggtcgcttcatagccgtaatagtcgttgccttcccagtgtgaacgcgacaccgaggacccgacgaccaactgatgttcgcgcccagccaggctgaacggcccggagaggtagaagtcaccgttgttgctgatggtcttgccggtgaacttggaaccatagactgcagttctgtcggtagtgcccgagatcggcgacgcataacccaatggcgcgttgtacccattgagctggttgctgtagttggccttggcgatccagccattatccagggcgtgttccagggtggcgaatacactgcggctgtattgcccccagctgctccacttcggcccgttgttgtagccacggtcgaacttgatttcattgcctacaccatcgaaaagcgagcggctgcccgaccagctcgatcctttgggatcgttgttctggtaatcggcgccaacggtcagcagggtgtccggggaaaggtcgaattcgaggatgccgtagtagacattggtcttgcgttcgtagtggtcaatgaacgaatgcttgtcctggtacgccacaacggcgcgcccgcggacattgccgctatcggtcagcgggccgctcacgtccagttcagagcggtagttgtcccatgaacccgcgcccaggcctacgtggccctggaattcggcggtcggcttcttgcgcaccaggttgatggtgccgccagggccgccggcgccggtcatcaggccggtggtgcccttgaggatttcgacgcgatcgtagatagccatgtcgctgagggtctggccagccgagtaaccctcattgcgcgtagtgggtacgccgtcatactggaaattctggatcgggaagccgcgggaatagtagttggttcgttcgctgtcgaaggtcgagacagtgatgcctggcgtgtggcgcatcacgtcgtcaataccgttcaggccgaagtcgtccatggtctggcgggtgacgacggaaatcgactgcggtgtctcacgcggcgtcagcaccatcttcgtagcggtcgcgatggtacctggcgtgtaggaaccggtgccttcggtaatggtgcccaactggttggcattgatctgggtcgcgcccagctccaaggcgccggtgccggaggcgggtgcgttgatgatcatcgagctgccctgcaggctgtagctcacgccagtaccggccagcaggcgttcgatggcctgcaccggatccatcttgccgctgacggcgctgctgtgtttgtctttgacggtgtccgggctatacaggagctgcaggttggtttgttgaccgaatacctgcaacgctgtactcaaaggttgcgccgggatgttcaattcgaactcttgcgcctgaacatagcccgccactggcaggctgaccgcaagggccagggcactggggagaacgtttaatttcaaagcccgtcgcatggagactgcggtgctcaacgggctgagggcaagccgtactggcatggattgtttctctttttagatgttagcagataggtacttaatgcggttaattctcattgctgcatatgagacgttcgcactcgcataaaccggaaaaatttatgcgggctccagttctgcaacgacttttccggcactcaaacgcaccaactggtcggcaatatcgaaatagcggtcgtcatgactgatcacgatgatcgtcttgcccaggcgcttgaggtccggcagcagttccgtgtagaagatgcggcggaaggccgggtcctggtcggcggcccattcgtcgaataccagtaccgggcgctcttccagccaggcgttgaccagggccaggcgcttgcgctgcccggtggagaggtcggtggtgctgaacacgccgtccttgacgctgaccttgtgcgcgatttccaggcgttccaggtacttggcggcgctgtccagcgactgcgtggcactgccctgtaccaggtcatcgaataggtagtagtcggcgaataccgtggtgaatagctgacggtagtcgtcgcgcgccgggtcggtcacggtttcgccgttgaggcggatttccccggcgtggggttgatacaaaccgagcaacagcttgatcagggtggtcttgccgcagccgttctcgccgacaatgaacacgatatcgccctgctggatgctcaggttgatcggccccaggtggaacggctggctgccttccaccggcggcgggctgtaggtcacgccgcgcaattccaggctgttgaccaccggcgtgggggcttcgctgccatccatgagcaagtgcggctcgggtgacgagaagcggtcggacagctcggtgatgcgcgcaaaggcaatccgcgccttgccgatgatcggcaagtagccaaccacatgctccagcgggcctttcatgtacagcagcaccagcacgaagccggtgatcactgcggggtccgggttcgggttataggcctgcatcgccagggccaggccgatgaccacgaagaacagcatcgagccgaaggtcttggcgacgatatagatgttcaccgaacgcacctggatatcgctgatgcggtcggcggtttcctggatgcggtgggtgttcatgcggtagcgacgtgggcgatggatgcgcagctccttggcaccggaagaaatcgcggagtagtagcgttgcaattcgtcttcctggtcgcgggcttcgtcgaagccacggatgcccttgtgcccggcgatgaattgcacgctgctgccaatcacgatggcaacgatcatcatcaggaacatcggcaccgacaggtacgccaggtagccaaggcaacccagggtcacggtagtcgcgatggccagcggcgtgaacgcaaaggaaaaatcactgatggtgtcgacgtcatgggtcagcaccgggatcaggcggtgagagcgaaattgctcgatctgctcgatgggcgccgaaagcaccttctcacccagttccttgcgcagtgccgcaatgatgcgttggcccacatagttggtgccgatatcggagacgatcgagctggtgagtgccagcacacacaacgccgcaaacgtcagaatcaccccctgcgtcatcccggtggacgagtgcaaggcgttgttgatggtcgccagcaacagcgtgatggccaggccgccggccatgcccagggcgacggagacggtcacgatggtgcgaaagggcctgagcaatgcgagcaaacctttgaaggcgccgcgcttggggtcggtcataaatacttcccggaaagtgaaaaaagagggggctgggcacacagacccttacccatgacaaacgaaggattggcgtgactatttagcgcggcgtgcccggcggtggcggggatggataaattaggcggggcctggttcgttcttgtggagtagccgcacgcgttttggcgcgtgcctgatttatccagcgagagcgaaacaatgacgaaaaggaatctggtgtacgtgtggtcactgcgcaatgccgccgccgacaaggcaggacagccagtggcctacaaggaccacgagcgctacatgatgtcggtgctggaatccctggcaggggccctgaacgacacgccgctgggcgaggcttataacttggtgggcgtggtatatgacgatgacgagcagaacccgcgcgaccagcaactggtccgcgactacggcttcgcctaccagccgggccgccaatggctgtacccggccgacctgcgcgtgcaggggcgcctggtcaatgacttgctgctgagcgtgccgtccacctatcggcgcctgccacggggcagcgcggaacacatcgccggcaagcaggacttcgaacgtcgcctgcacgacacgctggtggaattgaaggcggacatcgtggtgctcgacggcctgctggtgatcctcgatgagctggtgcgccctggtgcgccgtttgccggccgcatcatgaacatccaccccggtattacccgcatcgaatcgccgtacgagcgccgtggcgcctatgccacctggaacgcgctgtacggtgcgcgggggctgacggtcacggattgggcgaccaaggccaccacgccatccgagccgctgtacctcaccggtgcctcgtttcactacgtggacaacggcattgattccggtgaagtgttccacgacgtgctcaagaccgagatcgcgccggacgacaccatccttgagttgcgctggaacaacttcaacaacagcctgttcccggcgttgcatgaagggttggcgttgttggcccagaaggcaatctaaagcagccacggttaaaaatgtgggagggggcttgcccccgatggcgggagtgactgatacaccgccatcgggggcaa

SEQ ID NO: 111 - DNA, 36609 bp, Pseudomonas nodulensis; identical to SEQ ID NO: 80

SEQ ID NO: 112 - DNA, 60451 bp, Pseudomonas nodulensis
gacacgcaactggaaccctatcgggacggtgtacctcaatcccgaaagggagctgacagttgtcgtgaaggtcgcctagcaagacgggagacacgacaactaccttgaaaaacgccgggctctggctctggcctttgatctgcttttgattttgatcttaggcgccccgtcaaacacgctggccggaattcggcagggatttggggggtaaaccggcagggatgccggtttagccgcctcgcgccatggatggcgcgtggcggcggccccccaaatcactgtcgaattacgggcataccgagcctaggcgaggtgccgagtgttggggcaagagcgttttgcttacttttgcgcttttcaaaagtgagccgctgtaagagcggaaccctaagtagccgttacctaaataacggatatgtccccaatccaacccaaccccccccaaacagcacgtacatccaattttccccaccccatcccccctcaaactccctcatcgctgaatcttcaaggcagagggacaccccatggacccaaccacaaaaccaggccccgacgaagtcgtcaccctggtggtcaaacacctcatcaaacccggcctggaggccgactacgaagcctggctgcgccgcatcgtccgcatcgccggcgaccgccccggccacctcggtgtcgacgtggtacgcggaaaacaaggcaacctggcgcttttcacctgtgtattgcgctaccgctccaccgaagacctggaaacctggctcgactcccccgagcgcaaaaccctgatcgccgaagccgcgcccatgctcgccgacggcgacaacaccgaaatcggcgcggtcaacgaattctggttcaaccccgaaaccccaaacgccgccaagccgccgcgctggaagcaggcggtggtcaccctgtgtgtgatcctgccgctgaccctgctggtgccgatcgtgtggggcccggtgctgcgcctgcacccgtttctctccaactacgtggtcgccacgttcctggtgaccgtgaccatagtcgtgctggtggtctacctgctgatgccggcggccacccgcctgttcgctccctggcttgaagcctctgtaaaggaaaccctatgaacgccgatctgattctgttcaatggccagttccacaccgtggaccgtgaaaacccgcgcgccacggctgtcgccatccgcgaggggcggtttgtcgccgtgggtaccgacggtgaagccatggccctgcgcggcagtggcacccaggtcatcgacctcaagggccgaaccgtcatccccggcctcaacgactcgcacctgcacctgatccggggcggcttgaactacaacctcgaactgcgctgggagggcgtgccgtccctggccgatgccctgcgcatgctcaaggaccaggccgaccgcaccccgacgccacaatgggtacgcgtggtagggggctggaacgaattccagttcgccgaaaaacgcatgccgaccctggacgaactcaaccaggccgcgccggacaccccggtgttcgtgctgcacctgtacgaccgcgctttgctcaaccgcgcagcgctgcgtgtggccggctacaccaaggacacgcctaacccgccgggcggcgagattgtgcgggacagcaacggcaaccccaccggcatgctggtggcgcggccgaacgcgatgattctgtattcgaccctggccaaaggcccgaaactgccgttggagtaccaggtcaactcgacccgccagttcatgcgtgaactcaaccgcctgggcctcaccagtgccatcgacgccggcggcggtttccagaactaccccgatgactatgcggtgatcgagcaactggccaaggaccaacagttgacggtgcgcatcgcctacaacctgttcacccagaagcccaaggaagaactcagcgacttcaagaactggaccggcagcgtcaccctgcaccagggcgatgattacctgcgtcataacggcgctggcgagatgctggtgttctcggccgccgacttcgaagacttcctggagccgcgtcccgacctgccgttgaccatggagcaggagctggaaccggtggtgcgccacctggttgaacagcgctggccgttccgtttgcacgccacctataacgagtccatctcgcgcatgctcgatgtgttcgagaaggtcaaccgcgacatcccgttcaacggcctgccgtggtttttcgaccacgccgaaaccatcaccccgcagaacatcgagcgtgtgcgtgccctcggtggcggtattgcgatccaggaccgcatggcgttccagggcgaatattttgtcgagcgctacggcgccaaggccgccgaagccacgccgccgatcaagcgcatgctcgccgaaggcgtgccggtcggcgcgggcaccgatgcaacgcgggtgtcgagctacaacccgtggacctcgctgtactggatggtcagcggccgcaccgtcggtggcctggaactgcatgccgaaggcttgccacgcctgaccgcgctggaactgttcacccacggcagcgcctggttctcgtccgagcagggcaagaagggccagatcaaggtcgggcagttggcggacgtggcggcgctgtcggcggacttcttcagtgtcgatgaagaagccatcaagtggatcgagtcggtcctcaccgtggtcggcggcaaggtggtctacggcgccggcgacttcgaagatttcgcccccccgcgcgtgccggtgctgccggactggtcgccggtggtcaaggtgccagggcactggcgcccaggctcgccgttgcaggcgcaggtgcaccagtgcaacggcccgtgcggcgtgcatgcccacagccacgaaaaagcccgccattccagcgtgccggtcagcgacttccagggtttctggggtgcgttcggctgctcgtgttttgcattttgattacccatacccccgtaaggagttgaaccatggctagccctcgtttgaacaaagatgacgccgttgtactgttggtcgaccaccagactggcctgatttccctggtgcaggatttctcccccaacgaattcaagaacaacgtgttggccctggccgatgtggcgaagttcttcaagttgccaaccatcctcaccaccagtttcgaaagcggccccaacggcccgctggttccggaactcaaggaactgttcccggacgcgccgtatatcgcccgtcctggccagatcaacgcctgggacaacgaagacttcgtcaaggccgtcaaggccaccggccgcaagcagatcatcattgccggtgtggtgacggatgtgtgcgtcgcgttcccgaccctgtgcgcgctggaagaaggctttgaagtgttcgtggtcaccgacgcctccggcaccttcaacgaaaccgtacaacaagccgcctgggcgcgcatgactgccgccggcgcccaactggtgaactggttcgccgtggcctgcgaactgcagcgcgactggcgcaacgacatggaaggcctggccaacctgctgtcgccacgcatccccaactaccgcaacctgatgaacagctactcggcgttcactgccaagtaactggctcaggttattccttgtgggagggggcttgcccccgatgacggtgtgtcagtcacaacttctctgactggcccactgctatcgggggcaagccccctcccacaatttgttttgtggtgtgtccactaacaggctataaatccgagaaatgtccaccgagaagcgacaatgaaccccttcgaagacatgcgcctgttctgccaggtcatggaatccggcagcttcaccgccgccgccgaacagctgggcctgtccaagcagttcgtcagccgccgcctgatccagctggaagaccgcctcggcgtacgcctgctcaaccgctccacccgccggctggatgtcacgccactcggccagagttactacgaatccgccttgcgcctgctcagtgaagtcgagcaagtggagcagggcatcgctggccagaacagcgaaccacgcggcaccattcgcctcagcgcaccgttgtcgtttgccatggcccatctgggctgcctgttaccgcttttcctgcagcgccatccccaggtggcggtggaggtcgacttgagcgaccgtcccgtggacctgatcggtgaaggctacgacctggttttgcgcatcggtaccctggaagattccaccctgatcgcccggcgtatcgccagcattccccgggtgtactgcgccagccccgactacctggccttgcgtggtacaccgcaaaaacccgatgaccttgccgaccacgattgcctgccctacggccacggccgccaggtgcagtggcgcttcaagggcaagttgcaggcgctgagcgtgagcgggcgcatgcgggtgaacaacggcgacttgctgcgcgataccgccatcgccggtctgggcgtaacctacctgccgacctttatcgtcggcgaggcattgaaggacggccgcctggtcacggtgctggatgaattcgcccccgaagacctgacgctgtcggcagtgtacccgcagcaccggcaaagctcgcgaccggtgcaggcgctggtggagttcctgcgcgaacgcctggctagcggctgttgaagagctggcggatcaggttgggcgtactgccggtccagcgcttgaacgaacggcgaaagttcgccgcatcgttgaagttcaggtacgccgccacttcatcattgctatagcccttgacctgatacaggtgcaacgccacctgcttgcgcacgcggtccacctgctgctgaaagccggtgtcatgcttgtgcaacttgcgcttgagggtcgccgggctcatggcgaaggcctgcgcagcctgttccaggctgggcggttggcgtacctgttcgcgcaggtagtcgtagaggcagtcgagaaagctgctggagaagcccagttgttcgatctgcacacgggcttgctggcgtgccacctggccggcggtggccgaggcacctggccaggcgcgggtgaggtattcgcgggggatgctcagcatgtccagcggccgttcgaagcgcgtctcttcgtccagatgcacccaatactgctcgacgtaacgcggctcggcatgactgaaactgcacgcccacggcaggcgctcgccgctgagccattggctcatggcgaccagcgaggtcatgctggcttccagtaaaaaccgccaatgctcgccggcgccgcaactgtctcgccagtacaggtaggcgtggtgcgcatccaactccagttgcagggtggccagtgggctgagcagcacctgttgctggatcaggatctccagggcctggtgcaggttctgcgcatgccccagggcatggctggccgcgccgtagtagccgggcaagagccgctggccgaacagaaaactgctgtcgtcggcgtcaagcaatttgcgactgttgccgatcaacccgaaaaactgctgcgggctcaaccgcgccgtgccggccaggatgtcctcgtgaaacagtcccgtgccgcgcagcaggcgatggctgtcgatgtcccgggacaaggccaggtcgatcagcgtggcgggttggtagtgccctggtatgaagcggctgtcggcttcataccagctggttttcacggccatctcaggcgcttttcgccagaggttgcttggccctggcgagggccaggttgaggcgcttgagcaagtcctggggcggctcgtccagggccatgaccacggcggtggtcgccgccagttgcaggcgctcaccgtgcagtcgggtcttgtgtgcaaggccgcgcactgcctgctgcaactccagcgccagttccttggcctggcgctcaccggtgttgggcagcagtaccacaaaacggtcgccggccaggcggcacagcagatcctggcggcgcaggttgagcaacagcaaatggctgagggcctgcagcaccgcatcgccttcggcatgcccgtaggcctggttgatggccgcgaagttgtccaggtccagcgccagcagcgacagcggttgctgctgggcctggctgtcttgcaggctctcggccagctggcgcttgaggtagtcggcgccggccagcggcgtgagtttgtcgaacagccgatgctcacggaacagtcgctcgcgtttctccatctgtgcgctgatcgccagttgttcgcggtgccagtggtagataccaatggtcagcaggatcatgcccaccggcatcggcccggactccagccagtggtcccaggtaatgctgtcgggcaggcggatgaattcgtcgaggctgtcgatccaccacgagaagaagatgcatgacaggcccagcgccaggtagttggtcacgcgcccggccggtcggcttttcagcaccagccctagccagatcagcgcgagcagggcggaaccgccttcgccgaagatatccagccacacccattcgctgacgcttttcaactcgccgcaggccaggtgcaggatcagccccaggtttgcggcgatcagcagcagggagagtttccagcggtggggtttgagcacggaaaacatggccgcgagtccttgcaaggttcagtcgtgggcgccagcacagcagatggatgtgacggttgcgtgacgcagggcaggggtcgaatcagctcatcccgccgacaatgaaacgcagaaaatgtgggagggggcttgcccccgatagcggtgggtcagtgaaaaatcagggggctgatccactgctatcgggggcaagccccctcccacagttgatcttcacaggtcatttcagctcattccaactcaagatcctgctcaagcccccggtttacggggctccccgccactcgctgtcacagaacggtcatcccccacccctagcgtgccctcccagttgccgggcctcttgcctggcgccaacggactcttggggaggattgcatgtacaagcgcaccgggctcgtcagcttcacgcttactgccttggccctggcgattgccagcgagcgactcaacgcggccgaagtggccaacgccgagcacgtcgaagtggtcggccaggcagcggccatcgaccaggcgctcaaggagcaacgcaattcggacagcatcaagagcgtgatacatgccgacggcgtggcccagttgccggatgaaaacgtcgccgaagcggcgcagcgcctgccgggcatcagcgtggagcgcgaccagggcgaagggcgctttgtcagcgtgcgtggcctgggcccggacctcaacagcgtgaccatcaacggcaccctggtacccgccccggagagcgctcgccgcgcggtggccctcgatgtgctgcccgcggagctggtgcagtcgctgtcggtgatcaagaccctcaccccggacatggacgccaactccctcggcggcacggtggatgtgcaaagcctgtcggcgttcgaccacaagggcctgttctacaccggcagcaccgaagccagttacgacaagaacacccatcagaccagccccaaattctccggcgcggccagcaaccgtttcagtcttggcgacggcatcgacaatttcggcgtggccgctgcactgagctggcagaagcgcgacttcggctcggacaacgtcgagaccggtggcgcctgggacttcaccgacggtgctcgactcaacgagttcgaacagcgtgactacgacatcagccgcgaacgtgccggtggcggcctgaacttcgactacaagcccgacgacctcagcagctactacctgcgcaccctctacagccgctacaaagacaccgaaacccgcaactccaccagtctcgaattcgccgacccgcaggcccccggccagctgggcgatgccgagggcaagcgcaagctgaagaaccgcgaagagacccagcaaatccagtcctacgtgttcggcggcgaacgcatgctcggcctgtggaccctgagcggccaggccggctacagccaatccagcgaagacagcccggcacacatcgccggtgccaccttcgacggcggcgactttgccaacagcggtttccatgacaagggcaagccacgcccgatcatcggcagcggcttctacgacgcgcgtaacttcagcctcgacaaagtcgactgggaaaaacagaacacccaggacaccgagaaaaacctgcgcctggacctggcccgcgactacgacctgagcggctatgcgtcccaggtcaaattcggcggcaaggtcagccgccgcaacaaggacaacgatctggaagcctgggtctacaaagacttcgacaccctcggcttcactgccgaccagctcaacctcacccagttccagaagggcaacgtcgactaccgcctgggcaattacggccccggcatcagccccagcgcgatcaagcagctgatcggcagcctcaacccggcggacttctatgacgagaccgaatcgcgggtcaacgacttcaccattcgcgaggacatcaacgctggctacctgatgaacactgtcgatattgacgactggcgcttcatcgccgggctgcgttacgaaggcactgagttcgaagccaagggcaccggcgccaccgatggcgtgttcaccccgaccgacacccagcgtcgctatcaccattggctgccgggcctgcatgcgcgctaccagatcgacaagaacacccaggtgcgcgcggcctggaccaagtccgtggtgcgcccgacctttggccagttggcgccgggcttcgtgatcgacgatgacgaagccaccttcggcaacccggacctcaagcccctggagtcgagcaacctggacctgggcatcgaacacttcatgggccgcgccggcaccgtctcggcgttcgtgttctacaaggacatcaagaatttcgtctacaacactgacctggccggcaccggcgcctggaccaacttcgccgaggcccacacctacgccaacggcgacagcgccaagctctacggcctggaactggcctactcacagaaattcgactggctgcccgcgccgtggaacggactgctgatcggtgccaacagcacgttcagccgctccagcgccgacatcgaaggtttcgacagtgccagtggcacgaaccgcaagcgcaacatcagcctgcccaaccagtccgacaccgtcggcaacctgatgctcggttgggaagacgacacgctcagcttgcgcctgtcggccaactacaaatcggcctacctctacgagttggcctcgatcaacgacaaggcccacgacctgcatgtggacgcgcagacgtttgtcgacttcagcgcgcgctactcgctgaccaagaacctgcaagtcagcttcgaagcgcagaacctcaccgatgagtcgtacttcgtctacaccggccaccgcagctacaacggccaatatgaagagtacggcccgacctacaagctgggcctgaccttcacccacttctaacccacacctcgattccattgtttttgacggattgacccgtacatgaagatttccaagctgtacctgctaatggccttgaccctctgtgcaccggcaatggccacggacctggtcctgaccccttgggcacccagcctcaatgccgaggccatggccgtgctgagcagcaccgaacgcctcaccgccagtacccgcaacggcctgcaactgctcgacgccaaaggcaccgaactcgcccgcttcaacggcaacttcagcagcctcgacacccgcgctgccggctcccaggtactgctcgccagcctcgacaacgaccgccagcaagccatgctgatcaacctcgacgcgtccgccaaaacctttggcaaaccgctgtacctgcccacccgtgactacccggtaaacggcctgtgcctctaccgtgacggcgccgccaacctgtttgtgttcctggtgggcgaagagggcaagggtgagcagtggctggtgggcaacggctcgacgctgctcggcgacccccagcgtgtacgcggtttgccgttgccgccgtcggcgcagttctgccaggtggatgacacaacccaacagctggtggtgaatgaagcaaacgtcggctggtgggcctacccggcgcacccggaagccgaggtcgagcgcacgccggtagcgctgttcgacaaccccaagcgtgaagcgggcgccatggcgctcgtgccgggcgggatggtcgccctcgatccgaagacggcccaggtgcacctgttccagcacaccggcacgcgttgggtcgagcaatcgagcctgacgctgccaggcctcaaggaaccggaacaactcagcgtcaacggccagcaactgctggtgcgcgacgacgacaccggcaggctttaccagggcacgctcaactggaaagccaaacccgtgacgaccgaaccggtggtgccggaagtcgctgcggtgcgccagaccgacccggtcggtcgccagggcgatgcggcggacgacccggcgatctggattcaccccgcgcaaccggaaaaaagccgcgtgctcggcaccaacaagaagcagggcctgctggcctacgaccttgacggcaagctgttgcaggaactggcggtgggccgtctcaacaacgtcgacgtacgccccaacttcaagctcggtgcgcagactgtcgacctggccgtggcgagcaatcgcgatcacaacagcctgagcctgttcagcatcgaccgccagagcggcgaactgcgcgaagccggtgaagtaccgacgccgctcaaggagatctacggcatctgcctgttccagcccgccagtggcgagctctacgcgatcgccaacggcaaggacggcaccttcctgcaataccgcctcagcgcgccggatggccgggtgcagggcgagttggtgcgccagttcaaggtcgacagccagcccgagggttgcgtggccgacgaccagcgccagcgcctgtttatcggtgaagaagacgtcggcgtgtgggcagtggatgcccgcgccgaccagccggccacgcttgccagcgtgatcaaggtcggcccgcagttgcacgcggatgtcgagggcctggcgttgtaccagagcaaccagcgcgactacctggtgatctccagccagggcaatgacagctacctggtgctggatgccgagccgccgttcgccagccacggatccttccgcgtcggcctgaatgcggcggccgggatcgacggggcttcggaaaccgatggcctggaagtcaccgccctcaaccttggcgggccgtggagccaaggcatgctggtggtgcaggacgggcgcaagcgcatgcccgagcagacccagaacttcaagttcgtgccgtgggccgaggtgacccgcgcgctgaaattgccctgagccgtcatcacccggtcatcacttttttatcgaataggagcttcaccatgcacgcgacgatggaacatatgacgatctggggcttgatcagcgacgccagcctgttggtcaaggcggtgatggtcaccttgctgctggcctccttactcagttggtacctgatcatccagcgcgccagtgtgctgcggcgcctggagcgccagttgaatggctttgtgcagcgctttcgtgccgcgcccgacttgcaacccctgtaccgcgacaccgtgcaggcaggcgagggcggtattgcgccgatcttcattgccggggtccaggagtaccagcacctgcacagccatgatccagcggtgctggaaggtgtagagcgcgccttgcaggtggcgatcaccgagcaggaaatcgagttggaaaagggcctgcaattcctcgcaacggtgggttcggtcagcccctacatcggcctgttcggcaccgtatggggcatcatgaattcgttcatcggcctgtcccaggtgcaacaggccaccttgtccaccgtggcgccgggcatcgccgaagcgctgatcgccacggccatcggcctgttcgcggccattccggcggtgatcgcctacaaccgcttcgcggcacgcggccagaccttgctcacccgttactacgccttcggcaatgagctgcaagtacgcctgcaccgcacgctgcgcggcacgtcgagccacctggccgtggccgcctgaacaggagcgatctcatgttagcaaggccgcaacgcaagcacgggcccaaggccgagatgaacgtggtgccctatatcgacgtgatgctggtgctgctggtgatcttcatggttaccgcgccgatgctcacccagggcgtgaagatcgagttgcccaaggtcgccgccgaggcactggccaccgacacccgccagcagatcctcacgctgtcggtgaaggccgatggtggctactactggaacctcggcggtgaactcgacacccaacaccagaccgacagcgccgtgaccctcgacgaaatgggcgccaaggtcatgcaggtggtggcggcgcgcagcgacacccaggtgtacatccgcgccgacgataacgccggttatggccgtgtggtcgcggccatggcggtgttgcagaagggcggggtgagcaacctggggctggtgaccgaggccccgcaatgacggcgatgatcatgcacagtccgacgctgacgatgccttcccgggggccttccgggttctggcgaaacagcttggcggccagcctggcggtggcgctgcatgtgggcgtgctggctgcgctgatgcttggctggtcgacggaaaaaccgccggtggaagcccccagggtgatgcatacccagttggtgatgctgccggctgcacctgcgccggctcccgcacctgaaccggtggctgtcacgcccccggaaccggtcgcggttcccgtaccggtgaagcccacggtcgatccgcagatccaggcgcgcaaactcgaacaggccgccttggcgcgcaagcgcgtcgaggaaaagcagcgggagcagcaacagcaacggttggccactgaacagcgcaaccgtgagcaggcacaacagcgtgctgaccagcagcgccaggtcgctgaaacagcaagagctgcaacacccgctgcggcgccggcgttcgacagccgccagtaccagcccttgagcaaggaggcgccggactaccccgagcgcgccctggacaagcacatcgaaggcgattgttcggtggaatacaccgtcaacacccagggccgcgtggaaaaccccagggtgctggacggctgccacccgctgttcatgcggccttcactggcggcggcgaataccttccgctaccagcccaggatcgtcgatggcaaggcggtgccggtgccggcggtgcgcaataccttccactaccgcatccagtagccggcgatcaattggcacggttgtacagctcaacactggcaacataccgctgcaggttcgccaggaacgtatcggcaatttcctccttgctctgggtggaaattgccgaggtatgcggcgacagcctaacccgcggacgggtgtacaacgcatgcccgtccggcagcggctccggctcggtcacatccagcgacgccaagccaacctgcccattgtccagcgcctccagcaatgcttcctgatccagcaagccaccgcgtgcgatgctgatcaggtgcaaacccggccaggcgctggcggagcacctcgttgtaatcctcgtccagctggctggcgataaccacctggctcatgtgcgctccttgtggcgttgggcgaaggcagccttgccgacaccttgtaataccgcgtcgttctgcggggtatgcacgcggctgcacagcacgtcgcggtagtgccgttgcagcgggctatggcgcgacaggcccgggttgcccgaggcctcgatggccagctccacggcacggatcgcgttgttggttaccaggtacttcaattgcgcggcgttggcggccggggtgtggccttcggcagcagcgtcgagcaggctgcgattggcaaacagcagggtgtcgatatggccgacggtttcctggaaacgcggcagggtcgacagcgccgcaccgagattggacggttggcgctcctccagccagttcaccagccagtcccgggcggcctgggccacggcgtcatacaccgacgacagcagcaccgacatccacaggaaaccctcggggtccaattctggcgacggcgcactccacgggctgacgctgacggcgtggtccagcggcaccagcacgttgtcgagcaccacttcatggctacaggtggcgcgcatgcccaggtggtcccaggtgtcgatgatactcacgccggggctgtccttgggcaccagccaggcgcccaccagcgggtcggcgtcgtcactgcggccccacacgctgaaccagctcaggccgtggctgccggtggagtagatcttgcgtccgctgatgcgccagccctcggcggtgcgcacggcggtggtcgccggcagcccgccacgggccggggtgccgaggtcgggctcgacgcgcagggcgttgatcaatgcgccgttgcgcaccgcgtcttcggccacttgcctgcgcaggtgcgcgggccaggtcttgctgtcttgcaggcgggtgtgttgcaggtactgcatcaccaggatcagtgcggtggacggctcgcccttggcaatcgcactgatcgccttgcgtgcctgggacaggctggccccgccgccgcccagcgccttgggcacggtgagggcgagcaggccgtgttcgtgcagcaacttgaagttggcgtgagggaaagcgccgctctcgtcgtagacttgcgcggtactggcgaactcggtggtgagacgttcgagcagggcgtcgaactgggcgacttccacggagcgcaaggagggctgcgaggatgggctcatgccagcgcctcttgctgcgcttcaacctcggcggcgacgctgtagcggttcaccggcacgtccaggccgaggttgtcacgcagggtctggccgctgtattcgctgcggaacaggccgcgctgttgcaacaccggcaccaccagttcggtgaagtactgcaagccatccggcagcaccgagttgatgatgaaaccgtcactggcgccgtgctcgaaccaggtctggatcgcgtcggcgacctgttccggggtgccgacgaaatcgcgcttgggtcgcgagaaacgcagggccacttcgcgcagggtcaggccttcgtccctggccagttgcttgatgcggtcggagccgcctttctggctgttggaccccaggtcccccagttccgggaacggcgcgtcgagcgggtattggctgaaatcgtggtcgttgaacgggcgaccgagggcgacgatggcatcttccacggtgaccagctccacggcctgctggtagcgactttccacttcagcttcatcgcggccgacaatcgggcggatgcccggcaggatcgacaggttttgcgggtcgcggccaaagcctttggcgcggcgtttcaggtcttgggtatacgccaggccctcctcgatgctgtccacgtgcacaaagatcgcatccgacttctgcgccgcgaagttgcgcccgtcctccgaggtgccggcctggaaaatcaccggttggccctggcgcgaacgcgcgatgttcagcgggcctttgaccgagaagaagtcgcccttgtggttgagtgcatgcagcttgcccggggcgaaaaattcgccggactgtttgttgtaggtaaaggcgtcgtcttcccacgaatcccacaggccctgcacggtgcttacgtgttccttagcgatgcggtaacgcacagcgtggggcgggtgctcggccttgctgaagttgtcggcggtgccgctgagccatgaggtgaccacgttccagccggcacgaccgccgctgatatggtccagggacgcgaactggcgcgccacctggtagggctcggtgtagctgacggtcaccgtggcgacgaggccgatatgtgtggtgatggcggcgagtgccgacaggatagtcagcggttcgaaacggttgaggtagtgcgggctggacttggcgtggatgtgcaggctgtcggcgatgaacacgaagtcgaacttggcggcttcggccaattcagtctgctgcttgtagaagccgaagctggtgctggcatttggttgggcctgcgggtggcgccattcgccccagccgtgaccgacgccatggaccatggctcccagtttcaaatgacgtggcttgctcatgtgctgctccttttagcgcgaggcttggttgaaggggacacgcttggcgttgaagctcttgtcgaagccctgcgacacgtcgatgtgcttgagcagcaggccttcctgttgataggtgtcggcggtcgcttgcaggccgctgatcactgcgtcgtcgatcgtgaccgggttcaggcgggtgtccttggctaccgtcacgtgcacgtccagcggcaggccggtgatcctggcctgggcggcggcgtattcatcggggtgggtattggcccaggcataggcgcggtcaacgcgggcgacaaagtcgtcgagctgcgggcgcttgtcggcgatggcctggctggtggcggcgaggtacaggtggttgctcaacagttggttgccgctgatcagcacgcgggcctggctttgcgaggtgaccacggtggtgtacgggtcccaggtggcccaggcatcggcggtgccgttatccagcaccaggcgtgattcgctgggcagcaggaaaatgaactgcacatccttggtcgtcaggccggcggtggccagggccttgatcgccaggtaatggccgatggaaccgcgcccggtgacgatcttcttgcccttgaggtcggcaacggtcttgatcggcgagtccttgggcacgaccagggcggtggtggtgcgcccttcggagtggatgatgctgaccaccttgagggaagcaccggcaccgagggcgaacacgtacggcgcatcaccgagggcgccgatgtccacggcaccggcgttgagtgcttcgcccaacggtgaggcagatgggaattccgaccactggattgtgtaaggcacgttttggctttcgccagaggcttccagtagcgccttgattgtcgatttctggtttgccacccgcagcggttgcaggtcggcggcagcggcgctgccgatcaggccaagggcgagggcggtgcccaggagcaggcgtttgaaagggcggttgtcgagcatggggcaaactccaggcgtttggtgtctttcaagggatacctccgcctggagaaggggtcggattccatcgcatgtacggggtgggtcagatcacatggaaaccgtgggtgccgtcgcgtgccaactggtcgaccaggccgaattcccagtccaaataggcttgcatggcttccctggggttgtcggtgccttcgtacgggcggcggtagcggtcgatacgcggcgaggccaggtgggtttcgcctgcttccagcggcagttgcgcgttgatccagccggcagtgccgtcctgcagcaggaacacctgcttgccggtgagggtttcgacttcagccaccgccaggcgcgccagttggctgctgccgcaggtcagcacgtaacgctgggcggcgggcaccttggccagggcctcggcgagttgtgcacgcagtacccaccaggctccggggatatggcgcttcacgtagttggcgctggcggtgaaatccagcaccacagtgtcgccgtgggagagccagtcgacgagggtatgggggctgatcagttcggcctggggcggcgccggtaccggcgcgacccaggcgccttgctcgctgaagtgcgccgcttgcaggtcatccagcacgtgcacttcccagcccaactgggccagccaggacgcggacatgtttgcgcgcacaccgtcgtcatctgccagtaccagccgggcaccgcgcacgctggcgaagtgatcggtttcctgcaccagttgcccgcccggtgtggagcgtgcgcccggcaagtgcccggcttcgaattcttccggggtgcgcacatcgaacaggtaggtggtgcgtgtggtttgctgctgccaggtgcgcaggtcgctcagggtggcacggccaacgcgggccttgtcggcgacacgccgcgcatccacggctgcgatctggcggtgctcctcggaggtcggcgcaaaacgccgcgattggccatgggcaagcttctgcccggccagggtccagccgatggtgccgttacgcagggccgacaccgggttggcaacgccggcattgatcagcgattgggtgccgataatgctgcgggtacgcccggcgcagttgacgatgatgcgggtggccgggtccggcgccagttcgcgggcgcgcaacaccagttcggcccccggcacgctgatgccggtgggaatgctcatggtctggtattcgtcgaaacgccgggcgtcgagcaccactacgtcggcctggctgtcgagcagcgcctgcacctcttcagcggccagggacggcgtatggcgttcgctttccaccagttcgccgaacgccttgctcggtacgttgacgtcgatgaacagctcgccaccggccttgcgccaaccgtccaggccgccttcaagcaggctgacctgggtgtagcccaaggcaaccaggcgttcggcagcgcgggcagccaggccttcaccattgtcatacacggtgacctgggtatcgcgccgcggaatgcgcgcatacacctccagttccagcttggacagcgggatgttcgcggcaaacagtggatgggattcggcgaacggcgcttcttcgcgcacatcgatcagggcgacttcttcttggtccaacagggcttggcgaatccgcgcaaagctgcgggtggagagggtggtcatagggcagggctcttttctttggacaaatcccagatattcgggaggaaggcgttggaataaccggagataaacagtttctcgctgccatcgggctggtacaccgcgcggcgcaccgcaccgatattggcgccgtacacatggatgctgatggacacctggtcgctgtgggcgttgctcacctgatggatgtcaccgaccctgggcgacaccgcttcaacctggcccggcaccagctggatcggcttgccttcggccaccaggcggccgtcaggggcgcgttcaaacccttgggaaaactctgagccgcgcagcatgccaatcaggccccacacccggtggtcatggatgggtgtgctttgccccggcccccacacaaagctgacgatgctgaaacgctggcgtgagtcggcatgcagcaggaactgctggtagcgttcgtgatcgggttgggcgaattcgtcgggaagccagtcgtcatggctgaccagttgcgccagcagcttgccgccacggtgtagcaggtcgccttcgcgtgggttgccgtcgatcaattccgccagggcgcctatgaaggctctgagtctctcggggtgtcgggcctgggtcatgacagttccatcgtgcggtcggtggtgatgggtttatctaagcataatgttaatagttaatatgctattttttaatgattagcttatagctgaaggtaatttagaactggtctgaatagcgttagacgttatcgatcacagcgcgggctattcaggcagctttcctgcaactatgcttcgcacacatcttaatgacggttctctatgtgcggcccaaatgaaaattgacgatatcgatgcctttgtcgaagtgattcgttgccagtccatcagccacgccgccgagtcgttgcaactgacccagccggccattacccgtcgcgtgcagaacttcgagcaggcgttgggggtggagttgttcgaccgcaacaccaaacccctcaagcccacgctgatcggcacccgcgtctacgagcagtgccgcttgatcctgcgcgagatggacgccttgcgcgaactggtggccaccgatgcaccacccactggcctgttgcgcctgggggtgccgcagaccatcggcgatgtggtgttgctggatgcgctcaagcacctgcgcaccgaataccctgacctgcgcgcccaggtcgctacggggtggggcagccaactggtgggcaaaatcgaacgcggtgagctggatgcggcggcggcgctgttcccggcgggcaagatcttcccggacaacatcgtcggcgagtccatcggcaagatggaactggtggtggtgtgcgccaaggcccagttgccgaagaaaccttgcaagctggcggatgtgtaccagaacggctggattctcaacccggacggctgcggcttccgtgcgggcttgcagcggaccttgtccgatcagggccttgcgctgcgggtcaacctggaaaccttcggcaccgagctgcaattgggcctggtggcggacggcctgggcctggggctggtgccgcgcccactgctggaacgcagcgcccatcgcgagcacctggcggtgatgccgctcaaggacttcaagccggtgatggacctgtggctgatctacccgcacttcctgggcaacctgcaagggccggtggatgcgtttggcaagctggtggctgcctcgttgcacaggatcaaggacgctgcctgatatgaaaaaaaataataattagcttagattaaaatgtgctttttattatttttttgcatcccctaggcttgcctggaagtccttaaggccatccaggaagttttgccatgagtagcgtcaccccgatttccagcgtttccagcaacaccgtccgccaacgcgttactccgcaagaatgggacgtgcgcgtcaagctggccgccgcctatcgcctggcggccttgtacaaatggaccgaccatatctatacccacttctccgcccgcgtgccggggccggaggagcatttcctgatcaacgccttcggcttgctgttcgatgaaatcagtgcgtccaacctggtcaaagtcgacctcgacggcaccatcgtggatgacccgacgggcctgggcatcaactacgccggctatgtgatccacagcgccatccacggcgcgcgtcacgacctgcaagcggtgctgcatacccatacccgcgacggcatcgcggtgtcggcgcaaaaagacggcttgttgccgatctcccagcattccatcggtttttccgggcgcgtggcctatcacggttatgaagggattgccctcgaccttgacgagcgcgagcgcttggtcgcggacctgggcgacaaaagcgtgatgatcctgcgcaatcatgggttgttgaccgcgggggtcagcgtggagcatgcgtttcagcaactgcagcaacttgagcgggcctgcaatatccaggtcgcagcgcaggcagcggggaatgcggagttgatcttcccgccgcaggaagtggtggagaaagtcgagcaacaggccaaggcgcacgccagcggcgaaggtccgggcgtggcgcggcattggaatgcgctgatccggcagttggagcgcagcgataccgactacaaaaactgagcttaatgtgggagggggcaagcctcctcccacattggtttttgtgttgtgctcaggcgacttgtttggcctgttcgcgttgtgcgatcagttggcgggtgagggggatcaggcgcttgccgtagtcaatcgcatcattcagcggatcaaatccacgaatcaggaacgtggtgatccccaggtcgtaataatccaccaaggcctccgcgacctgctctgcggtgccgaccagcgaggtggagttgccctgtgcaccgagcaacccggcaattccggtccacaagcgcttatccaggcgtgagccttgcgccgctgcagcgagcaagcggcgcgagccttcgttgggcggttcacgccgtacaaagccatttttctcggccagctcggtggcttgctgcaagatcctgtcggcccgtgcccacgccagctcttcggtctcggcgaggatcggccgcaacgacaagctgaagcgaatcgtgcgcccatgcctggctgcttcggcgcgtacctgggtgacgatctcgcgcacctgctcgtaggtttcgccccacagcgcatacacgtcggcatgcttgcccgccacttcaatcgccgctttggacgagccgccgaaatacagcgggatatgcggctgctgtggcgacttcaccgtggagtacgcaccttcgacctgatagtaggtgcccttgaagtcgaagggctgctcgctggtccattcctggcgcaccacgctcaggtattcgtcggtgcgggcgtagcgttcgtccttgccgatatggctgccatcggcgcgcagttcacggtcgtcgccgccggtgatgatgtgcaccgctgtacgcccgccgttgaacacatcgagggtggtgaattggcgcgcggccagggtgggctgggcgaaaccggggcggtgggcgatgagaaattgcagtctggtggtcacgctggcggcgtgggaggcgatcagcgtgctgtccgggctgttggagtggaaggccaccagggcgcggtcgaaaccggcgtcttcgtgggcgcgggcaacgctctcgacgtagtcgggttgcagggtagggccgctgcgcggatggatctcggaagcgtgatggccgccaatgtagccgatgaattcgatgctcatggtctgtccttgtcttgggtgtgattaccacctccaccgggcagggggtcggttattcgcgtccaaagtaggggcaggggcggggtctgtaaaatgccgattggttctaacctaattattaaaatgtggaattattaaattggctgtgtatcagtaaattgcatttttagaatgccagggcgaatcacccgctggcttttcatgtgccgaggctgactttagataacgttgtattttccctggcactgaggtctgatgggcgccgaaacgggcttgccggattggggaactatgcgggcagaacttgcgcaatatggcggcattaccgtcatgattccggccgctatcatcatcgccgtgtggttgcggtattccaaccctcgggcactgagggcctggatcataacggttggtgtggcttattcagtggtcgcgctcagcaagttgctgttcaagggctggggcctgtcatttcagcacttggacattgccgtcatcagcggccatgccatgaatacctgcctgatgcttaccgtggcgctgagcctggtggcccgccagttcaatccggcattgcgctggccggcggcaggtgcggggttactcgccagtgcctggtttggtgcttactgtgttgcgccgtacatacatccactcaatgaagcactggccggtgtcaccgtgggggctgtcgcggcgattgcctttctctggcgcattgagaccacccacgtcagggtgtccccttcgttcatcggcggtgggctggtggtgttgctggcctgcacactggtgcccaagttcaatgccgagttgctgctcaaccgggttgccatcaccttgtcgggtgccgaccaggcccatcaagcgccttcctggcggctggatgcggcacacacaaaggccgagtaagtcaccaggtccagcgcccggtggctgtccaccatcagttccagcaacaccgtctgcgcattgaaacgccgcatatcgccgcgccgccgtgcctcgttcatctgcttgagcagcgtatgggtgatctgctgcggtgagctgccgtgcagttgctccagccaacggccgatggcctgggtattgcgccggtattgggtacccactggcggcttggcgaaaccttcgaacatcccggtgagtcttctcagcgcatagctgcgtatcacgtcatccaacaggctcatggccgctcctcagtgccgcagatgttcgccagcagctcggcggtcttgaccagcatgaactggctgtcaccgcgactttccacgcacaggcacaccgacagcgcatcactcacctgcaacttgaagcgccaatcggcgaacaccatcgacagtccggaacaggattcatcgctgtccagggaattgtcgcggtataacacctgcatgcgctcgacgacgcgggtcgagttattcacttcgacatgaatatttcccgaagaaggaaataggccaatacgctctaccaataactttgacatgttcatggccgtctcttcgttgttgcggtcaggcggcactttattctgtgggagggcaaaagtactggaatgttatttttagtcggttatgccgggtgttgttatttttagtctgcctcggcaggtggtcgaagtaccgcggttgtgatcataatcgcctcgctgcttgaagtaaggtcatcccttttactaccgggttaatacagtcggcgcgtgggaggttgccttgttcaataggattttgattgtgtgtgtcggcaatatttgtcgcagccccacggcagaacaattactgcgcaatgcgctggcgcactccgcgatagaagtgagttctgcggggttggccgcattgcgtgacagcccgctggagcccacggctctgcgggtgctggaagagcacgggcatgcaccggcttcacacagggcacgtcaactgacaagcgctgcggtgagtgacgcggatcttgtactcgtgatggagcaacggcatatcgacggggtactcagcctcgcgccggaagcacggggcaaagtgttcctgctaggtaaatggcaatacaaccgcgagatcatggacccttatcgtcaaggcaaaccagcctttgttcatgcctatgcgttgatagaacaagcggctcaggcgtgggcgcaaaggttagtcggtaaagttggttaaaagtcgtcatgtaacacacttgataagttctgcgttaatcgtgcatggagccgggcgtcttgcaccctgtgccattccttgactattggttggaaaaaagaactgacttatgcaatcaacacccgcaacagcgtcgcataacggcgaagaaactgatctggatttcatgatgttgttgggcacgttgctcgatcacaaatggctgatcggtggcatcagtatcgtctttatggcgctgggcgtggcctatgccgtgttgacgcctccggtctatcaagccaccgcactgattcaggtcgaaccgaaaaaaggcgacatgctcggcttttccgatgtcggcagcctgctcggcaaggagtcgcccacggtcacggaggtcgagttgatccgctcacggatcaccgttggcactgccgtcgacaacctgaacctggacctcgaagtgaagcccaagcgcttccccttgatcggtgatttcatggcgcgtcgcttcaagccagcgcaagcccatgaggtggcgaacccctggctcggcctcgacagttacggttggggtggcgaggccctgaagttttcgcggttgcgccttccggctgacttgctgggccaggaactgaccttgactgccggtagtggcagcacctttaccctgtcggaccaggaccaaaacgtgttgctgacggggcaggttggtcgcttctatgaaagcagcggcctccaactgcaggtcgaaacgctggatgccaaccctggcgcgcaattcagcgttgtgcgttcgccacgcctcaccagcattctgcgctatcagaagctgctggatgtggcagagcgcggcaaggagtcggggatcattggcctggcgctggaaagcacgcggcccgaggcggccattcaggtactcaatgaggtcgcccgtatctacgtgcgccagaacatcgagcgcacctccgccgaggcggcccagagcctggccttcctcaaagaccaattgccccaggtgcgcaaggatgtcgagcaggctgagacggcgctgaaccagtttcagatccgcaacaaaaccatcgacatcagccttgaggccaaggccattcttgaccagatcgtggcgctggatgcgagcatttccgagctcaagatgcagcaggcagagatcgagcgaaagttcaccccccagcacccggtgtaccgcgcgctcctgacgcaactggcagaactcacggcccgtcagagcgagctggccaagaaggtcgaaagcctgccgaccacccagcaagagttgctgagcctgacccgcgacctcaaggtcagcaccgagatctacacgcaattgctcaacaagtatcaggagttggatgtgatgcgcgccggcaccgtcggtaacgtgcgcttgatcgataccgccgatgtcgacctgaggaacccggtcaggccgcaaaaagcattgatcgtggtgatcgccacgctgctcggtgcctttgttgcagtcgcgctggtgctgtttcgcaaggcgctcaatcggggcgtgtccaaccccaacgagttggaaaaactcggtttgccggtgtatgcggccatcccgttcagtgccattcagaaggacatggaccagaagctctttcgcagcaacaagttgggctccacacagttgctggccctcagcaacccaacggacctggccattgaagggctgcgcagcctgcgcacgagtctgcatttcgccatgttggaagcgggcaacaaccgcttgatgatctccgggccgagcccgcaggtgggcaagacattcgtctcggcgaacctggccgctgtggtcgcgcattcggggcagcgtgtgttgttggtggacgtggacatgcgcaagggttacttgcacaaagtctttggcgttgcggcagaaaacggtctgtccgacctgctcgccaaacgctgcgagctcaccactgcgatccatcccacggaggtcgagaaccttcacgtccttagccgtgggcggatcccgccgaacccatcggaactgctgatgcacgccaacttcagcgaattcctggaacaggtcagcgcgctgtacgacctggtgattctggatacaccgccattcctggcggtcaccgatgcaaccatcgtcgggcggcagtccggcaccaatctgatcgtggcccgtttcgagttgaactctgtgcgcgaggtggagctgacgatgcgtcgctatcaacagaacggcattgaactcaaaggcgcaattttcaacggtatcgagaagcgctcatccgccaaatacggatacggcgcctacagctattaccactacgagtacaagtcagacagcgtttgatcctggacgccaggcatttgaagtccaacgcgcaacacgtctaccactggccgcaggttcaacgagaaacgctatgaaagtcacagtttttggcattggttatgtagggctggtccagggcgccgtccttgctgaagtcggccacgatgtgctgtgtgtcgatattgatgcgcagcgggttgagcgtctcaaacaggggcatatcccgatctacgaaccgggcctggaggcgcttgtcagggaaaaccatggggccggccgcttgaatttcaccaccgacgccgtggctgcagtcaagcatggcgaagtgcagtttatcgcggtggggacaccgcctgatgaagacggctcggccgacttgaagtacgtgctggcggtggccgagaccattgggcagcacatgctggccccgctgaccatcatcgacaaatccaccgttcccgtgggcaccgccgacaaagtcagtgcacgggtggctgccatgctcgcgctgcgcgagcgcaccgacctggccttcgacgtggtgtccaacccggagtttctcaaggaaggctgcgcggtggcggactgcatccgtccggaccgcattgtcatcggcaccgccagccggcatgcggaggcggtgatgcgcgagctctacgcgccgttcaaccgcaaccacgaaaaaatcatcgtgatggatgtgcgcagcgccgagttgaccaaatacgctgccaattgcctgctcgccaccaagatcagcttcatgaacgagatggccaacctggccgagcgactgggggccgacatcgagatggtgcgccagggcatcgggtccgatccgcgtatcggctatcactttctgtatgcaggcgtggggtatggcgggtcgtgtttccccaaggatgtccaggccttgatccagaccgccgagaccctcgacttcgatgccacgctgctcaaggccgtggaacgacgcaatgccgaacagaaaaacagcctgttcaacaaactgtccacgcatttcaacgcgcaactggcgggcaagaccttcgcgctctgggggctcagtttcaaacccaataccgatgacatgcgcgaagcccccagccgcgtgttgatggaggccttgtggcgtgccggggcaaacgtgcaggcctttgatccggaatcgatggaagaaacccagcgtctctatggcgaccgcgaagacctgcgcctgtgcggcaccaaggaagcctgcctgaaaggcgccgatgccttgctgatcgtcacggagtggcaggtcttcaaggcaccggacttcacggtgatcaaacagcagctcaagcaaccgctgatctttgacggacgcaacctgttcgaccccgtcagtgtgcagaagaaaggtattcactacgtatccgttgggcgacctctcaacccggtataggtcttcccatgagtgtgcttaaaagaatcgtcagcggcattggcgccaattcgtttggccaggtggtaaacctgctgatccaggtggtgagtgtgccggtgctgattgccagttggggctttggcgcctacagcgaatgggtggtgctgtctgcgattccaacctacctggcgctgtctgacctgggcgtgaccacggcggcatcgagcaaggtcgtgatctggcacgagcgcggacggttgaaggtcgcgagtgcggtgtacagcaccagctttgcgtttctatccctggcgggactcagtgtgctgttgctgaccctgggcgccctggcgttgtttgacctgttcagcgtgctcaacctccagtcgatcaagagcggcgacggggtgctgattctctcggcgctgaccggctactcgctgctttgcctgtttaccaacatgatttcgatccgctaccgggccaataaggccttgccgttgtcggcattcatcatgaacgtcatccgcatgctggaatggtcggccgcgttgctgtgcgcttacctgagccacagcctggtcgccaccagcctggtgctgttggccgtgcgcgcgacgggcatcgtcagcaagaaccagatcgccaatcggttggggatcgccttgcgtttcaacctttctgcgatcggcaggcgggcatttgtgacattgatcaaaccgtcgctggcttcgctggcctttccgattggcctggcgttgaacgtgcaggggctgatcattctgttgtcggtgctgctgtctccggcgcacgcggcgatattcggtttgtaccggaccatttccagggtgttggtgcagttctcgaccgtggtgaaccaatccctgtggccggagatttcctatgcgttctctatcggtgacaaccaactggtccgcaagatgctccgctacgccttgcggttctcgctgcccatcgcctgtgtgctgggcgcgctggtggtgatattcggcgggacgatcttcgatgtgtggtcgggccgcaaagacgattattcctccagcatcatgctggtgctgatcatcggcgcgctgacccacgtggcttggcaggtgtattgggtggcaatgatggccacggcgtcctattcgtcgtttgccgtggtgttcatgttggtgtcaatcgccagcattctggcggtgttctgcctggcacaagactatggcttgctcggcgtctgctacgtgctggtggccaccgaagtcgtcctgttctgttttgccaggcgcggtttccatcatcttgaactgaggatggcccgtgctgattaatcacctgatccgccatcgattgaaaatcagcctgctgacgcctgaggggctcaagtacctggccaagcgcgtgctgttgctgggccgcttgctcaaggccgatcgccgccaacgcatgttgcgccgacagggggccagcctggctccgctggtgatgatcaatgccgtggaattcgaaggctccgtcgcgtgtttcagcgtgggcaccggcagctttatcggcaagcgcacctttatccaattgcacgccgccgtccgtgtgggcgcccatgtggcgatcaatgaaggcgtgcgtattctcacgggtacccatggcctggatgatcctgcctggcgcttgaaagtcgccccggtggtgatcggcgactacgcctgggtcgccactgacgcgatcatcctgccgggcgtgacgatcggtgaaggtgccgtcgtcggtgccggcagtgtggtcgggcgcaatgtggaaccgtacagcgtggtggcgggcaatccggcacgggtcatcaggtcgcgtgctgcgcatgcgtttacctacagcccggtccgctcaagtgccgtcgtcgaagcctggatgggtaaataagatgattctggtcgctcatcccgttggtaatcagaatgtccgcgcgttgctgcgcgcgttgaatcaacggcagttgctgcactcgttccatacctcgctggcactgcataaggagtcgttcctctgccgtctgccggtggtgggcaaggagtgcctgcggcgtacgttcgatcaggtcgatggcgcgttgctgcacagttacccgcgttatgacgtgccgcgtgtgatctgcgacaaactgaggtggtatcgcctgacacggcgcaacaccggcatcttctgcccggaaaacgtctaccaccacattgaccaggccagcgccggtttcctttacaagaccccgcgcaaacccagccaggtgtacggctatgacggcaagtgcctgggcttgttcagcgccgcccgcgacatcggcgacatcaccctcaattatgaggcggccttcggctccatcgcctacgcctgcaggatgcttgagcatgagcgcgaggccaaccctgcctggcgtgccagcattcccaatatcagcgatgacaccgtgcgcaaacagacggccgagttggccttggcggaccggatcatagtggcgagtacctttgccaagcgcaccctgggtgagcacggcgttgcgccaggcaaggttgcgatcacgccctatggcgcgccggcgccgatggtgcgtcatgaagcaagcgcccggccaggtgcacgattgaaagtgatttatgtcggcgcgctgacccagcaaaagggcatttcgtactttttcgacgcgttgaaccttgcggcgagcagcgttgccctggacgtcacggtgatcggtggcgactacgccaacggtcgcaaccccgtgctcaatgccgagctgaaaaagtaccagtggtttagctccgcgtcccacgatgacgttatccgccacttgatggaggccgatgtgctggtgctgccgtcggtcgccgaggcgtttggcctggtggtgggtgaagccttgtccacgggcacagcggtgatcgtgtcgcagaactgcggggcggccgacctggtcgtcgagggtttcaacggttatgtggtgccgatccgctctgccgaagcgatcgccagccgtctggttgagctggccgaagacaaggacaagctcagtgcgttgcagcacaacgctgtgttgtctgccggtggaaccacctgggacagctacgccagggaggtgatggatgcaatccttggccattcctgacagggtcagcctgcatgagcgctaccgcacgcgggtggtcagcgccttcgtgcttatctacctgttcatcctgttcgaagggatcttgcgcaagtgggtgatgccgagcctcagttcggtcatctatttcatcaaggacccgattgttctttatatctactggtgcgcctaccggttcgggtttttctcgaaaaacctggtgtcggcctactttgtcgtgctggtcatggtgttcttcctgctggtggcagcgtttttgttgagcagccctgaaggcttcgtcatctacggctacggcgtgcgcaactacctgctgtatttcccgttgatatttgttgctggcaagacgctcaggttgacggacgtctatcggttcgcccgtatcacgctgttcgcggcgatcccgatcagcgtgctggtggtgctgcagtattcgtccggaccccaggcgtatgtgaacaaaggcattggtgatgatgacttcatcttcatgattgccgacggtgtcgtgcgcccctacggcaccttcacgttcaccgccgggcatgtggtgtacgtgtcggcctgctttgcattcctggtcgcggcggtgtttgacaaggccttgttccgtgccgtgttcgcccggcgctacgggctgtttggcgtgtcggcggctgcggtggcggtgatgtgtttcctcacgggctcaagggccatctacgcgtacgctgcgattgtgctgctggcggcgctgatggtcgccttgatcaagaaatcgcaacgcaacctgttgtcgttgtttttcctggcggccgcgctgtttgtcagcctgctgattttcatgtccaccgacagctaccaggtgctggtggagcgcaaccgcagcgcggtggccagtgaaggctcgccggtcactcgcgcgttctccagcctgtatgcgttcacgcgtgtggttgatgacgcgccgttgtggggccacgggataggttcgggcaccaacgccgcctcgacgatcctgcgcgcagggcgggagcagggcgcaggctttttactggccgaagatgaatggtcacgcatcgtgctggaaatgggcctgcccgccgggctgatgttcattctgttccggatcttcgtgctgctctggttactgctcaagtcctacacggcgctggtcaggcaaggcaccggggtgccgttgctgctgtgcggtttcctggcgccgatcctgttcaacggggtcatgaccatgcagggcaccttcctggcgtttggcgtgctgtatgcctgcctgattctcgcggcctgcaagaaaacctgaacctactcaacgcatcagcggacgacagcacgtgaagttactaagaatcatctcttcggtcagaccggaaaaaggcggcccgatcaacgcggcccgggaaatcgacacggtgctcgcccaggagggacatcgcgtggatgtcctgacgctggatgccgagttcgcggtggactatcccggcaccgtgcacttcatggggccaagccgtttcggctacggcttgaacggcaacatccgtcaatggctggagcagcacgcccggcactatgattttttcatcatcaacggcttgtggcagtaccacgggtttgtcgcccgccaagtgctgaacaagttgggccgaccttacatcgtgtatacccacggcatgctggatccctggttcaagcacgaatacccgctcaagcatctgaagaagtggttgtactggccctggggcgaataccgggtgctgagggatgcgcggcgcgtggtgttcaccagtgaagaagagcaaatccgtgcgcgagagtcgttctggctgtatcgcgcccatgaaacgatcacggcgtatggcactgccagcccaccggccgatggggcgcgcctggcacacgacttcatcaccgaccacccggaactcaagggcaagcgggtggtgctgttcctgagtcgcatccataagaaaaagggctgtgaccacctgctgcaggcatttgcccaggtcgccgggcaagacgagcggctgcacctggtcatggccggccccgatcaaggcggctgggtacaagcattgcaggatcaggccgaaaagtcgggcatcgcccatcgcatcagctggcccggcatgttgcaaggtgcggcgaagtggggcgcgttctacgccgccgaagtgttttgcctgccttcgcaccaggaaaatttcggcgtggtggtggcggaagcgctggcgtgcggcaagcccgtgctgatcagcaacaaggtcaatatctggcgtgaaatcgacaaggatcgcgtgggctttgtcagtgacgacaccgctgacggcgccctgcacaacctgcaacgctggttgcagctggaggcgcccgcttacgcgcaaatgtccgagcgggccagggcgtgctttgccgaacgctttcatatccgtcgcggtgcgcagcgcttgctggagattgtgcgggagtgcttcccgtgattcttcaaggcaatgacccgcaccgttcggcctcgttctcattgggccatcggttgcgccgccagctctggaacatggtgtacgtggtgctgtttcgcaccagcccgcgcccgctccatgcgtggagggcctttctgctgcggctgttcggtgcgcggttgggcaaaggggtgcacgtgtatccacgggccaaggtctgggcgccctggaacctggagctgggtgaccatgtcggcattgccgatggcaccacgctgtacagcatggcgttgatccgcatcgggcgctacagcgtggtttcccagggcgcgcatttgtgcggcggctcccacgactacaacagcaagaacttccagctgtatgcaaaacccatcgtgctgggggagcacgtgtgggtgtgtgccgaggcgttcatcaccccgggcgtcagtgtggctgacggcgtggtggtgggtgcccgcgccctggtgatcaagaacatcgcgcagccgtggaccgtgcatgcagggcatccgtcccgccagatcggcctgcgtacccagcatgtgcaggagcccacgccatgaagcgcgaaaccatcagcgtgatcatcctcacctacaacgaaagcctgcacatcgcccgggccatcgactcggtgcgggccttcagcgatgaagtgctggtggtggactcattctccaccgacagcacctgcgacatcgcccgtgcccacggcgcgtgggtggtgcagcacccgttcgtcaaccaggccaagcagttccagtgggcgctggacaacctgccgatcaccggcaactggacgctgcgcctggatgccgacgagatcatcgaggctgacctcgctgccgagatcaacgcacgcttgccgacgttggccagcgatatcaccggcatcaacttcaagcgcaagcacattttcatggggcgctgggtgcggcacggcgggcgttacccgttgaggatgctgcggctgtggcgcaccgggctcgggcgcatggaagaccgctggatggacgagcacatctcggtggccgagggtcgcaccatcaccctggaaggtgggttcgccgaccataacttgcatgacttgaccttcttcacccacaagcacaaccagtacgccacccgcgaagcgattgaagtgctcaacacgcggctggggttgtttgcgatccgcgatgaactgcacacggggcagagttcgttccaggccaaggccaagcgcctgatcaagaaccgcctttataaccgcgtgccgttcaccctgagttccaccgcctatttcttgtggcgctacatcatccagctggggtttctcgatggccgcagcggcctggtctatcacctgctccagggctattggtaccgcttcctggtgggcgccaaggtgctggagctggaaaccgcaattgcccatttaaacgataaggaagccattgtccgggaactctcgaagttgaccggccataacttgaacctgcccaaacagaagtaactgaccgtttttaacaaacacccaagtttgggtgtcggccttcgctcgcctatcaatcgggagacagacatgaacaaagttgcgcttatcaccggtattaccggccaggatggctcgtacctggcggaactgctgctggaaaaaggctatacggtgcacggcctcaagcgacgttcgtcgtcgttcaatacccagcgcatcgatcatatttaccaggacccgcaggccctgcataaaaacctgatcctgcactacggcgacctggcggactcgtcgaacctgacgcgcatcatccagcagatccagcccgatgaaatctacaacctcggcgcgcaatcccatgtggcggtgagcttcgattcaccggaatacaccgccgatgtggacgccctgggcgccttgcgcatccttgaagcgatccgcctgttgggcctggaaaagaagacccgtttctaccaggcctcgacctccgagttgtatggcttggtgcaggaaaccccgcagaaggaaaccacgcccttctacccgcgctcgccctatgcggtagccaagttgtacgcctactggatcaccgtgaacttccgtgaggcctatggcctgtatgcctgcaacggcatcctgttcaaccacgagtcgccgcgccgtggggaaaccttcgtgacgcgcaagatcacccgcgccctgaccaacattgcgttgggtctggagccgtgcctgtacatgggcaacatggatgccctgcgcgactgggggcatgccaaggactatgtgcgcatgcagtggatgatgttgcagcaggacagcccgcaagatttcgtgatcgccacgggtgtgcagtattcggtgcgtgacttcattcgctggtcggcggcggagctcgggctacgcctgcgctttgtgggtgaaggcgtggaggaggtggcggtggtcgagcacatcgatggcgacctggcgccgggcattctggtgggcgatgtgattgtccgggtggacccgcgttacttccgcccggccgaggtggagacgctgctgggcgacccgtccaaggccaagcgtgtgctcggttgggtgcctgaaatcagtgcgcaggcgatgtgtgcggagatggtccgcgaagacctcaagatcgcccagcgccacgccttgttgcgcctgcacgggcatgacgcaccgattgcggtggagaactgaacatggcgcgtgatcttgatgcgcggatttttgtcgccggccatcgtggcatggtcggttcggccatcctgcggctcctgtgggcgttgggctacacgcagatactcacggcgggccgcgatgaactggacctgctcgacccggcggccgtgcaggcatacttcgccaggcaccgtatcgaccaggtgtacctggcggccgccaaggtgggtgggatttatgccaacgccacatacccggccgacttcatctaccagaacctgatgatccaggccaatgtgatccacgctgcccacagccatggcgtgcagcaactgttgttcctcggctcgtcatgcatctacccggtgcatgcgccgcaaccgatgatcgaagcggtgttgctggacggtgcactggaacccaccaacgagccctacgccgtggccaagatcgccgggatcaagctgtgcgaaagctacaaccgccagcacggccgcgattaccgcagtgtgatgccgaccaacctgtatgggccgggcgataactaccatccgcaaaacagccatgtgatcgccgccttgttacggcgcttccacgaagcgacccagcgcggcgatgacgaggtggtgatctggggcagtggccgaccgcgccgggagttcttgcacgtggacgacatggcggcggccagcgtgcatgtgatggaactcgatgcggcgcgctaccgcgaacagacccagccgatgcgctcgcacctgaacgtcggcactggcgtggattgcaccatcgccgagctggccgaggcgctggtgcgggtcaccggtttccaggggcgcctgcgtttcgacgccggcaaacccgacggcgcgccgcgcaagttgctcgatgtcagccgtatcaacgcccttggctgggaagcctacgtgccgctggaggagggcttgcgtgacgcctacaacgcctatctcgcggcgctcgaacagcctcggggccagtgatgaaagtccttttgtacggcatcaattacagcccggagctgaccggtatcggcaagtacagcggtgaacaggcgcgctggctggcggcgcaaggtcatcaggtccgcgtggtcacggcgccgccgtattacccgcagtggcaggtgggcgagggctattcgccgtggcgttttcgcaccgagctggatgccggcgtgacggtgatccgctgtccgctgtacgtcccgcgccagccgacggcgatgacgcgcctgctgcacctgataagtttttccgccagctcgtgtgtggcggtgctggggcaactgcgctggaagccggacctggtgatcctggtggtgcccacgctgttctgtgcgccccaggcgttgctgttggccaagctcactggcgcgcggtcggtgttgcatgtccaggactatgaagtggatgcgatgctcggcctgggcattggcggcggttcgctgttgcggcgcctggcgttgggtgtggagcgctggctgctgcggcgctttgatcgggtctcgacgatttccagcggcatgctccacaaggcacggggcaagggcgtgtacagccagcggttgatgttctttccgaactggtcggagaccgcacgctttcgcgatgtgccgcgcgaccgcgcgttgctgcaacgcctgggcgtgccgccgggaaccaaggtgttgttgtactccggcaacctcggcgagaagcaaggcctggagctgatcctcgatgccgcccaggcccatgcccagcgcacggagtgggtgttcctgatcgtcggccagggcaccggcaaggcgcgtctactcgaacgtgtacagcgtgatgggctgcgcaatgtgctgttcgcgccgttgcaggcctacgaggacttgccggcgctgctggcctcggccgacgtgcacctggtgatccagaagcgcggcgtggcagatgcggtgttgccgtccaagctcaccaatattctggccgtgggcggcaacgcaatcatcaccgccgaccccgataccaccctcggccgcctgtgcgaggaacatcagggcattgcggtgttgatcgagccggaatcggtcacggcactgagcacgggtatcgagcgggcactggcaatgccgacgcgtaatgaggtggcgttgaattacgccaaggagttcctcgacaaggaacgcattctgcaacgttttctggcacaggtttgatgggtatgtggcttgatttaccgaccttccaaacggtcgtggcttcgacgccgttggtggcgatcgacctggtggtgagaaacagccgtggcgaggtcttgctcggtatgcgcgtcaaccggccagcctttggtttctggttcgtgcccggtgggcgtatccgcaagaacgaaagcctcgacagcgcgttccggcgcatcaccggcgaagagctgggacgcacgtttgaacgggccaatgcacgactgctcggcgtgtacgagcatttctacgatgacagcgtgttcgccaacgccggcagcgggccggacacccactatgtggtgctcggctattgcctggacctggacgatgggcagactcttttgctgcccaccgagcagcatcagcagtaccgttggtggccacaggatgaactgcgcttcagcccgcgcgtgcatgaaaacagccgcgcctatttctgacgctctgcctcgaggatgcatttatgttgttacccgtgatcatggcaggcggttcggggtcgcgcctgtggccgctgtcgcggcaacagaaccccaagcagttcctgcgcctgaccgatgcgcacctgtcgatgctgcagcagaccatccagcgcctggagggcgccaacgtcgccttgccgcagttgatctgtaacgagcagcatcgtttcctggtggccgagcagttgcgccagctcggcatggagcaggcgagcatcctgctggagccggtggggcgcaacaccgcgccggccatcgcgctggcggcgtgcaaggcggttgccgagggcctggacccgatcctgctggtgctggccgccgaccatttgatcgaagatgtgcccgcgttccatgccagcctcgaagtggcgttgcccctggccagggctggcaagctggtgaccttcggcatcaccccgacctgcgcgcataccggctacggctacatcgagcagggtgcggcggtgggcgagggcgggtaccgggtaaggcgctttgtcgagaagccggacgctgccacggccgcgcagtatgtggcgagcggtgattacgcctggaacagcggtatgttcatgttccgcgccagccgctacctggcagaactcgaacgcttccagccggccatgctcgaagcctgccgcgtggcgctggagggcggtagccaggacctgccgttcacccgcgtgcatgcggcaaccttcgccacatgtccggacgactccatcgactacgccgtgatggaaaaaaccgatgacgcggtgatggtgccgttgcacgccggctggagcgacatcggctcgtggtcggccctgtgggaggccagtgcaaaagacgccggcggcaatgtgctgcgcggtgatgggttgctgctcgatacccgcgatagctatgtgcacgccgacagccgcctggtcgccaccgtcggggtgcacgacttgatcatcgtcgagaccaaggacgccgtgctggtggcccacaaggaccaggtgcagcaggtcaaagggatcgttgatcagctcaagcaagccgggcggcatgagcacctcaaccaccgcgaggtgtatcggccgtggggcatgtatgactcggtggacagtggcgcgcggtatcaggtcaagcgcatcaccgtgaagccgggagccaaattgtcggtgcagatgcatcaccaccgcgccgaacactggatcgtggtcagcggcacggcccgggtcaccaatggcgagcagacctacctggtcgcggaaaaccagtcgacctatatccccattggccaggtgcatgcgctggagaatccgggggtgattcctctggaattgatcgaagtgcagtcggggtcttatctgggcgaagacgacattgttcggtttgaagacaagtacggcagggcctgaagtttccgacaattaataacgttccggataacttcaaccatcggcaatgcagtgagggccgggcactttgccggtaaaacgttattttcaactaatgctcctggaagttacccgtctggtgtgctgtttagttggatggcactatcggcccggctactcactgacgataaggagtctgttatgagaaaagcactggcggttattgtgctcagtgtcatgagtaccacggtgttggccgacgagttgccgttggggctcagtacaccgctggcgggttcggtgacagtcggggaaaccctgctggtcgccagcgccattgttgccggcgtggcggctgcgtccaacagcggcggcagttccaacggcggcaccaccaccgggaccaccggtacgaccggaaccaccggcaccggcaactgatccaccacttcccgcttttcagactgcttggactccccacccaagtagtctttttttcttgtcgtttatcgcgagtgtccgagcactatgatgcgtattttttctgtggcggccgtggccgctgcattgttacagggctgcatgttcgcacccggccaatacatggacacggcggcgttgactgaaagtggcggcgcgcaaaacagtcgggtggatttgattccgatcacgccaaagttacttgccatggacgcggccagccaagtaccttattccattcccgcggaactattgagttataagccgggcccgtatttgatcggcgccaatgacgcgttgtatatcaccgtgtgggatcaccctgaactcacggcaccgtccggcccgcaacaacagatcgatgccaacggccgcttggtcagccccgagggcaacctgttctacccctacgtgggtgagttggttgccaagggccgatccattgaagcgctgcgcagtgagatcaccgacaagctgcgccaatacatcgatagcccccaggtggacgtcagcgtactgcgcttcgccagccagcgcgtggtgatcaccggcgcggtagccaaggccgggccggtgccgatcaccaccatcccgctgaacgtgatggaagccatgggcgccgccgggatcgacccgctcaatgccgacctgtccaacctcacgctcagccggggcggcaagcgctacaccctggacctggacacgctcaacttggcgcagtcgcgcttgaacgacatctacctcaaggacggcgaccagctgtacctggcctacaacgaccgcaagcgcatctatgtgatgggcgaagtcatgcagccccgcgccctgaccttcaagacccgcagcatgaacctctccgacgtgctcggctcggtgggtggggtcaatcagaacacctccaacgcggacgcgatctatgtgattcgcggcgcgcagaacatcgccaacgagccggccaaagtgttccagctggaagctgcgtccccttcggccatggccctggccacgcgctttgatgtgcagccccaggatgtggtgtttgtcggcccggcgaatatcacgcgctggaaccgcttcatcagccagttgatcccttccgccacgatcgtcggcatcggagcgtccactcagaacaacctgagcgaagccagcagccgatagggtggaacctgcgtgaacactcataaattcgctgcttacaccggcttggcgtggctgttggctggctgcaatccgctgatgaccgcctccctcgataccttcaaggcggccgtggctgggccggcgccgctggagctgacccaggcccaggtggacgcagtgccgtttgcccagatcaaagtcaccacggtgtccagcgaaggggtgatggcgctgattcgccagcgtggcgacctgcagttctgggtggcttccggcaagcaggtgctgttggtgcgtaacggcttggtggtgcgtacggtcggcctgggcgtggacctcaatggcacgcactggcaggaccagtcgccgttccagcaaggcttgcaccgtgtgccggatggctaccaaagcacgcggcagatcgatggggtggacggctatcgcatgggcatcacgctcaccagccgtatgacccgcaagggcatcgaaacggtcgagatcctcggcacgccctacgctttgttgcgggtggacgaagacgtcgaggccagcggttttcaggcgcgcaaccgttactgggtcgaccccgtcgacggctttatcgtgcagagcgaacagcacctcacgcccgacctgaccctgaccatcacccagctgcaacccactcgcaaggacgcccgatgatctgtcgaatactcacggcgctgctgctgtcctggagttgcgtcagtacgagccacgccgccgtgaccgtcagcggccaggtgcgcaccccagggcctattgcgctgccacccgatccacgtttgctggacgcgatcattccgtcgcaaccggatgcccagggttattggctgggagcggcctggttgcatcaacccttgctggaacgccaggcgcggctcaaggccggtgtgctgtttgatttgcaaaccctgcaccaggccgcgcgggctgacgcacgcgaaggccgggcccgtgttgccgaacgcttgtatcagcaggtgcaggccttgccggtcactggccgccaggtggcggtgctggacccggtggcggtggaagtcggctttgcgccgaacctgccgctcagcgatggcgaccgcctggtgtacccgccacggcccacgcaggtgcgcgtggtgggggctgtcgctgcggcgtgcagcctggcgttcgagccgctgcgggcagcccgcgattacctcaccgcgtgcccgccactggtggaggcggatgctgattatttgtgggtgatccagcctgacgggaaggtctcgcgcctgggcattgcgccctggaaccgcgaagagggcgcccccccagcgcccggcgctacgctgctggtgccgatccgcagtgacgacctgagcgcgtccacccctgacctgaatcagcaactggccgagtttctcgccacccaacccctggccgaggttacgccttgaaattatgtattgcggccgtgctgctggtgccgtgtggcgtcgcgcatggtgatccccgttacacccaaagcgatttcggcggcgtggggctgctgcagacgcctaccgcccgcatggcgcccgccggcgaactcagcgtgaacgccaaccgcaccgagccctacagccgctatagtttttctgcgcaaccactggactggctggaaggcactttccgctacaccgcgatcaccaaccgtccttatggcgccgagtcgttcagcggcggccagagttacaaggacaaggccgtcgacgccaaggtgcgcttgaaccaggaaacccactggctgccggaagtggcgctggggttcatggacctgggcggcaccgggctgttttccagtgaatacctggtggccaacaagcggtatggcgacgtggatttcagtgctggtatcgcctggggttacctgggcagccgtggtgattttggcaacccgctgggcgcgctggatgatcgattcaacgagcgtcccagcgctgaaggatccggcagtttttccaacggctatttccgtggccggcccgcgctgtttggcggtgttgcctaccagacgccctgggcgccgttgagcctcaagcttgaagtggaaggcaacgactacaaaaatgaaccacgcagcaacagctttcgccaggcttcaccggtcaacctgggcctggtctacaagctcgccgatgcggtcgacgtgagcgccgcatgggagcgaggcaataccgcgatgttcggcattaccctgcacaccaattttgtcagccgcaaggcacccgccaagacctatgacccaccggctcctccgttgccggcgaagccaccgaccacaccgccggaccaggtggattgggccgccgtgtccctgcgcctgcacgataacgccggctacaatgtgcaacgcattacccagcgtggtccggagttgctggtgtatggcgaacagcagcgctatttctacagcgccaaggcggtggggcgcgccagtcgtatcctggacaacagcgtgaatgaccagatcgactggttcaccctggtcagcgaacgctatgccatgccgatcgaggaaaccagcgtgccgcgccagacctttcgcgaggtggtcaaccagcgcgaagccttgcaggacctgcaccgccaggtcgaggtcaatcgtgccagcgagcgtacgcagaccgtgctctacacccaaacgccgaagcccctcagctatgggctgggcctgggctacaagcagaacgtcggtgggccggatggtttgctctaccagatttccgccgacctcgatgccgagtaccgcttcacccgcaacacctggtggagtggtttgctcagcgtcaatctgctgaacaactacgatgggttcacctacgacgcgcccacgggcttgccgcgggtacgcaccgacctgcgcaagtacatgaccagtgccgacgtgaccttgccgacctttcagctcaaccatgcgcagcgcctggaccaggacctgtacggcatggtctacggtggtttgctggaatcgatgtatgccggtgtgggcagtgaagtgctgtaccggccgatgggtcagggctgggcggtgggtgccgatgtgaactatgtgcgtcagcgcggtttcgagcaggatttcagcctgcgcgactatcgcacggtgaccgggcatatcaccgggtataccgacctgccattcaacctgcagggggccttgagtgtcggtcgctacctggctcgggactggggtgcaacgctggatctttcgcgggagttcaacaatggcgtgcggattggtgcgtggatcactcgcaccaacgtgtccaagcaagagtttggcgaaggcagcttcgacaagggcctctacctgtccattccgtttgatgagttgatgagcctgtcgacgatgcgccgcgccaacctggtgtgggcaccgctgacccgcgatggcggcgcgcgcctgaatcgcgcgtattcgctgcattcgatgaccgatgggcgcgacagtgcattgttctacaagaatatcgacaagatcactgagtaaggccagtaggatcgggggttagtagatgtccttggacagcagcgtaaacggtgtcttcagcaggatcttgatatccagccacaacgaccaggtgttgatgtagcgcaggtcgatgtcgacgcgtttttgcatcttctccagagtctcggtctcaccccggcatccattgatctgcgccagcccggtgatgccgggcttgatgcgatggcgcgccatgtacgcgtgaatcttgcccgagtaatagtcgttgtgtgcgatggcgtgggggcgtggaccgaccagggccatatggccttgcagcacgttgaacaattgcggcaattcatcgatagaggtgcggcggataaaccggccgaccggcgtgatgcgcgaatcattgcggctggcctggcgtacctcgtggtcgtcatgcacgcgcatcgagcggaacttccacaccttgatcacctggccattccagccatgacggtcctgcttgaaaatcaccgggccgggggaggtgagcttgatcagcagggcaaacaccaggagcaccgggctcagcaccaggatggccaacagcgcgatgctcttgtccagcaacgctttgctcagggcggcggtggggcggctggtcagcgggctttcattgaggaagatcgctggcagcccatccacttcggcgacgcaatggttgagcagcagcatgttgttgaggtcgggcacccagatcacatccacgctgatctccagcaggttgaggtacaacgcctcgatgtgggtggcgtcctgcaacgagtgggtgatgtacaggcggcgaatgccatgctggcggatcagttgcggcaattgcggcagctcgccaaggatctgcgcctgtgcatccggagcggcctcggcatggctgccgacgagccccaccaacggcgagcgcttttggcgagacagagtgttcgccaggtcaacggcaagtttgccggtgcccactatcagtgacttatgccgttggtgaagttggcgatggtaataccgggacaggctgtgcagcgggatataacacagggccagcagagggtaactaaccgccgcccagagcaacaagatgtccaatggaaacaatgcggtggcattgcaggcgatacccaccgcgaacacgattaaagcggtgagtaaccagcccatgaacagtcgtcccaagcccacgccatagtcatctttcttgctgtagacatcacacagactgtacgccggtaatgaagccagtatggtaaacgccgcgagcacacggtagttgtactcaagttggccggtcttgaacacgaccaacataaataacagtgcaacgaccaaacccgaggcaagcatccactgaccccagaacgtcaaccccttgggggtcaggttgcgatgcattctagtgttattcagcatagttctgctcccggtggtgaccacgcaggtggtggcagggtctaatcacgcggtggaatacccgcactaaaagataggcacgcgcagtcgcgtacccacggatagtaatgaacggcaggaggcattggctgacgacttataacaaggtcagcggcgtcttagtgtgagagtgttataaatgggcaggtaaaagtgtgtattaataggcagggtgggtatcaaagtatccgttcttgttttttttgttttagcggcgtgacggggtgagttccagtggtttcttgattttttgtgtaaggcaataaccacggtttctgaccgcacgaaacaaacgttcgccgtcgttggcacgcttgaacttttcctgcagccggctcaggcacatttccaacccgcgatatagatcaggttcgcgtccgatattacggatcagttcctctttgctgacaacacgctcttcatggtgcagcatctttttaatcaacgccgattcaatggttgtcagtgaaatacgtaagccgcctttgaccagggtgcggtcatgctgtgtcagtagccagaaatcctgaggataaagttgagttcgctcagggtttatctccgtaggccgagtggggttattgggcgtgctgtcgtgatccgttggcatggggagtctggattcttgtcgcacagagttaaaagagtgtgagggtaagccaagtgtgtgggtaatgacataggttgtcaggcgtcggttgtcgtcggagttggagtgtagagggttgtttgcacggattttagggtctgtttctgttggcgcgaatgtattcaagtcgtaatgaaacaattcggcattgggcgtaaagtctcgcagtgcgatggccgcaagtgtgggggtgaaggcgtgtttcttgagggagctcatagtgtccaccgttagtatgaaagtgcggtttttataagcaatcggcaggggagtagtaaccgccctgaaagtattcgaacggcaggtttttagccagcatggcactgtcggcaaattccacggtgtcggcgatgaagcgcacccgggttgcactgatcagctcaagcatgcggtcgtaaagccgatcgaacagaccggaacgcgtattcaggctcagccgcagggcggagtccgggaaaggcattttcacgtagtcgtaaagcttgaggtcgatcagcaggtctgccggttttgtatcgagtctgtaattgttgtaggccagggtgacagcgcactggtcttttaacttatataactgacgcaccatcgctcggcgctcgacagggccgggcagggcatccagaggattggtaatactgagcgtaaagggctgtctgcgtttttccagtgactgggcggtctgaacaatgctcttgtggagatcttcgttcatcaaggcggcttgatcgatccgcaggaacttgcggctgacaacggaattgcaggctttatgtggtgcgctgatacgttgcagcgccttgtggtaggcactgtcgggtagttcgtgagcctgcagtgagccaacgctgacttcgttgccccaaagtgcatggctgcgatcaacgatggcttgcctggcaagcctgaagtccacagcatcggcaggggctaccttttcgctattcacggtgggatcgttccttggcggtttgaaaatggctggcacatataactccccggcttagtttgtaaccataaccacggatattctgaataatgttgtcaccgtagtgcgccttgattttactgcgcagtcggctgatggacttttccagggcgcgggagtcgtagtacttggtattaaggcccatgacttcggcgatttcattgtgactgagcagtcggcgctgtataagcgcgtccagaactttcatttcgacgaaggatatttcaagtttcttgccattaccataaaggcacatgcgatcctgatcgagcaccaggccacaacgattcagtcgttcaccttcactgagaaaagcatcaaacaggcttaactttttttcaggggacgcctctgccactttgatgcagtaatccgcgccggccagatagtatttggtcttgctcaaactggaggcgaatgtgacgacgacaaatatggtgcagttgggatggctgtttcgggtttttcttattatatccagggtttgattgcttgccgcgggggtgtcgatttctatgatgatagcgcggtagcttgcatggctttcctgggtgtcaacaagttgttcgtagtaacgtgtatcgactttcaaatcatccgctacagtgcgaactataagctcccgaaaatcctccgatttagattgagtccgtgcaatagcgaggacgttggaaaaatgcatcacctactcccttttccggcatgcaaggccgtcagttcaatcgctgctagcgtttagatactaatcgaattgaatacggtaaaacgtgacaaattttaacattcgccactttgtttttcagaaaggaatggggtagtgcgcggttattgcgagggtttttgcacgggcgtacacatatgctagtgcaaactcttaatgtgcgataagtattttagcccaaacggtttttttgctgaatcggggaaacccttgcatcgctaaggagggaaggcagaggtgcgcgccacgcgcctgcattcaaatctgctcctccccccgcaattgcacactcatgtcatcgcagtttttcgcccagtcgctgagccattgcggcatcggtggcgaggtctcatccaggcccagttccttcacaaagtcgcccgggggcagggtgcccttggctgaacggaacagcccgcgcatcaccaccacgccgaccacccggccgttgctcacgaagcggtgctccatcaggctccacttgtggtcccagccgagcatgcgtgtgtgtacctcaaacacttcgaacagcttcagctcgcgacggaatttgccccaggtatcgccgacgatcggcagcgccttgttgcgcaatgccacgcgaaaggccccggtgcgcaatacgaaatccatccgggcaacgtccgccagggaaaagtaccggccattggtgacgtgtcggttgatgtccaggtccagcggccacacgcgcatgcgcaccaccgtggtgtccaggccatgcacaggtttgcgccaggggcgccgggacagcatgaagagcaagcgaaaccacagattcatccaaagcacctgacagttgttcaaaggcagcactgtaggggcgtggaatccgctaaggtagatgcacaaatgacttattacatgcgaaaaacgcaatcgggcttttatcatgcatatcaccttgcttctggctgatcgctgctccgccgccagcgccaccacggccctggagatgctcagcgccgccaacctgtttgccgactcaccgcctttcgaagtcgcagtggcttccctggacggtcacgccgtggtggcctggggtggtcaacgcctgcaggttgatcacgcgctggcgcagatcgtgcggactgacctggtgttgatcccgggctttctgttcacgctgaaggaggccctaccgacctttcctgcgtacgcgccctggctgcgcaaacagcacgcacgtggtgcggtactggcttcgatgtgcaccgcagcttttctattggctgaatccggcgtactccagggcctgcgcgccacgacccactgggcgtttgccgagttgttccggcgccgctacaccgacgtgagcctggaggacgcgcagctcctctgcgaagagaaccgtgtgatcaccagcggcggggcgactgcagcgatggacttgatgctgcacctgatccgccggttcggctcgccggaactggcccatacctgtggccgatacctgctgatcgataacgtgcgcagcgaacaatcggtgtatgccatgtggtcactgcccaaaagccatggcgacggtgaggtcctgcgggtacagcactggctggaacaacactttgccgaacccttggtgattgacgaggtggcccggcaattcggttttggcgtgcgcaatttcaagcggcgcttcaaggaggctaccggcttcacgcccattgcctacctgcagaccctgcgtctggaacgggccaagcaaatgctggagtcgacccgcatgaccctggaaagcatcacctacgcggtgggctacgaagacagcaattcattccgtcgcctgttccagcaacgggtaggtgtgttgccggcggcgtatcgcaagaagttcctggtccggccggcttgactcaggggcgcggcaacagatcggcaaggcgttgctgtagatcgaccgtgacctgcatgaattacaggcgaaaaaaaaccggctgatcaggccggtttggggttcccgcaaacagcgcgggattatgcgttgttgccttgcaggcgatcagcaccgccttcggccaggccacgttcctgcaagcggtcagcaccgccttcggccaggccacgttcctgcaagcggtcagcaccgccttcggccaggccacgttcctgcaaacggtcggcgccaccttcggctacgcggttaccttgcagacggtcagcaccaccttcagcgacacggcgttccagcaggcggtccgaaccaccttcggcaacacggttgtcttgcaggcggtctgcaccaccctcggcgacgcggctttcgatcaggcgatccgaaccgccttcagccacaaccgggtgggcaaaagcattggcagcgagtaccgagaaagcgaggctaagcaagatttggcgtttcatgattgtgtgctccgagtgttttgatttaagtgttgccgggtatgggtttgatgttacgcgttgcattttttaagagaacttcattgggctgatggtgactatcgacgccagcgatggctcgtgtgggcgagccatcgcagggccggtcatggcatctgcggcagttcctgggggcgcaggtcgaacaccagcacctcggcgtcctcgccctggctcaggcggatctgccgctcatcccgcacccgggcgccgtcgccttcctgcaagcgctggccgttgatttcaacactgccccgggccacatggaggtacacatggcgatcgggcggcaggtccagggtcgcggtttcatcgccgttgaacagcccggcatacacccgtgcgtcctggcgcacgctgagggagccatcggcaccgtccggcgagatgatcaactgcaggcgcccacgtttctgggcctcgctgaagtgttcctgctggtagcgcggttcggcaccggccacggcaggcacgatccagatttgcaggaagtgcacgccacgggtctggctgtggttgaactcgctgtgggccacgccgctgccggcgctcatcagttgcacatcgccggggcggatcaccgagccggtgcccagggtgtccttgtgttccagggcgccttcgagcacataagagaagatctccatgtcgcggtgcgggtgctggccgaagcctttgccggcggcgacacggtcatcgttgatcaccaacaggtcggaaaaccctgttcttgcgggttccagtagttggcgaacgagaaggtgtggaacgacttcaaccaaccgtgattggcggcgccgcgttcggaagctttgcgaagggtcagcatggtcttgtcctcaagtgggagcgggctgcggtatgcagggctccggcgttgagaagaaggttaatggttactgggttattcattaagaagatgaaaactgaataactgtctcgttcaggttgacagtttcgagcgtgtcataatgcccgccgtattccttcccgatggaccttacctgctatgaaaaccgtggccatggcgctgtttccggacttcctgctgctcgatatggccgggccgctcgaggtgttttccattgccaaccgctacctgccggcggcggcgcattaccagatcctcacccttggcaccgagcccggtccgttgcgcgcctccaatggggtagcggtgcagacggacctgctgctggaccaggcccaggacgcctacgatctgctgctggtgcccggtggccccggtgcctataacgaatgtcacccggcactgctgccgtggctgagggccgcggccccacgggcgcggcgcttcggttcgatctgcaccggggcctttgtgctggggcatgccgggctgctggacggtcaccgcgtgaccacgcactggcactacaccgagcgactgatcaaggcgttccccaaggcgagggtcgaaacggatcgcatctacctgcaggacggacgcttgatcacctcgggcggcgtcaccgccggcatcgacctggcgctgtcggtggtggcccaggaccatggcaagcaagtcgccgtggacgtggccaaggtgttgctggtggtgatgaaacgccagggcggccaggcccagttcagcccgatgacggcggcggtggcaccgcaggaaaccacgattacccgggtgcagaaccatgtgctggcgcatctggaccaaccgttcaccatcgagtccatggctgagttggccggcatgagcgcccgccattttgcgcggctgttcgccaaggaagtgcagatgacgcccatggtcttcctgcaaggcgcgcgcatcgaccgcgcccggcagttgctggagaccaccgacctgccgctcaagaccgtggcttttcacgcaggcttcggcagcgtgcggcacatgcgctttctgttcagtgaaaaactgggcctcaacccgacccaataccgacagcagttcagttaacgacagaatgtccgtctcgcgcacccgaatgtccgtgtcgctccctgtgccagcattgtcctgtcacgggtagctggcaagatagcgtcaagcccacggaaaaggatgcgcaaacgcccaaggccgggtgtttcagcgctattgcacatatgaacaatcctcaggcgattgacgctgatggcacggttcgcttcggcgcctatgtgtttcaccggcagcagcggctggtcagcaagtcgggttggccggtgcctgtgggcgggcgtgcactggatatcctcacggtgctgctcgaagcgcccgggcagttcatcagcaaagccaccctgatcgagcgagtctggccgaacagcgtagtggaagaaaacaacctgagggtgcatatcgctgcactgcgccgtgtgctcgatgggcaacagttcattctgaatgaccctctgcgtggttactgtttcgcggcccgcgtacacggtgcgatgccggccgcgctgccacggcacaacctggcgatgcggctcagtgcagtgatcggccgtgacgaggtgttgggcgtgctggttcggcgtctgtccgggcaacacctgatgacgcttaccggatgcgccggtgtcggcaagagcaccctggccctggcattggccgagcgcgtgttgccgcgctaccgggacggcgtgtggtgggttgacctggctaccgtcgaggcgccgctgaccatgttgcgccacttggctgcggcgctgcacctggagccctgcagccacgccagcgaactgtgccgtcaattggtctcgcgccagctgttgctggtgctcgacggtgctgacctgctgctcggcgcctgccggcatctggtgcgtgtgctgcacgacaccgcgcctcaggtcagtgtgctggtgaccagccgcgaaagcctgcaagtccccggtgaatgggtgcaacgcgtgcccaggctggcgatcccagggccgactgcccagggcagtgtcgaacaggcgatggcttacccggcggtgcagttatttgttgcgcgggtgcgtgccagccagcaagggttcgcgctgcgcctgcatgacctggcgccgctgcgggacatctgtcggcgtctggacggtatcccgctggcattggaattggccgccgcccaagtcgatgccctgggcgtgcgcggtttgcagcagcagttgcgcgcaggcttgcaggtgctgacccgaggccggcgcaccgcggtggaacgccaccaatccctgacggcggccctggactggacctaccagcgcctgagcctgccggagcgctggctattcctgcaattggggttgttcaaaatggccgtgaccttgcccacgttgagtgaactggtcgccggtaccgagttggaacacgccgacctgtgctacctgctggggcgcctggttggcacgtcgctgctgactgttgaccccggccctggagacccgcgttaccgcctgctcaattgcgtgcgcagctacgccctggcgcaactgcgcgacccgttgcaggtggcgcgtttgcagcagggctatgggcattacctggggccgttttcaggccggccgtttgtcctgcaactcgtcgagcaggctgcgtacgcggactaggtcctgggtggcaaagccttcggtgaagcgggcgtagatcgaactcagcaagtcgcgcgccgcctgtatgcggccttgcgtctgccacaggcttgccaacgaggttgcacagcgtaattcccaggccagcgcgccttgctggtgcgccaggcccagggcttccagcagcagggcttctgccgcacggctatcggccaggctttcggcgcgcactcgcaggatttccggggtgcaccagccggccgcgccactgctggcgcgctcgaaggccgcgtcactgacctcgattgcattgaaggtcaccaggatatcctcgaccaggcccaacccctgcacatccgcgatgggcagcgtgccctcataacaacgcgcccaggtgtgaaacaactgcaccgagtgcttttgcgcctgttgcagcagctggtcctgatgttcgtgggccatgccgctgtcgccgttatagcgagcgatgaccaccccggccagggccagggtgtagcagatcgacgtgccatggttgatctgcaaggccagcgccagtgcctggcttgcggtacgccatgcgcgctccggataaccgcgcagccacaagatgcgcgcaaggatggtcagggaggcgacgctctggtcgtactgcacgccaaagccatgggtaaagcggttgagatggccgctctgggccatgcgctggatcacttgttcggcattgtgctgcgcgagggcctggtgaccggcgaagtgctgcgccaacacccgcaggcgctgggcactgagggccagcaacggctcggcctgcgggccgagctggtcgaagtgcaggctctgcgccaaggcctcacggtagttgccgcagcacaggttcaccgccatatgccccgacaccgcacgcagctggccggccaggtccttgccggcttccgccaggcgccgcgcgcaactgaacgcttcaatggtctgcggcgtgccgccctgggtgtgataggagaaactgcccagggccagttgcaaggccatgttcaagcgctggctcggcgcattcgattgcccgagtcgtgccagggccttgcccacgtacaagccgtgttcgcgcagcagcgacagctcctgccacaacggcatcgcactcaccgtcaggcgaatgcccagcaggtgcgcaccctggtcgcccaggccccagtcgagggcggcgcggatgtcttcgcgcagcggcgcatagcggtcgatccaggtctgggtcgcgatcagttcccaatcgtcctgcgcctggttcatcagcgccaggcagcgctcggcgtggtgctggcgggtggcgtcgagttcctgggcgacgctgagtttttccagggcataggtgcgggtgatgtccagcaggcggtagaccatctcgtcatcgccggcttccacattgagcaaggacttggcgaccagctgagtgatcgaattcagcacctcgtgcggtgcaatctgctccccggcaatcaccgccgccgcgctggccaggctgaacccgccgcgaaataccgccaggcgacgcaggcagatctgttcgcaggcggtcagcagcgcaaagctccagtccagggtcgcgcgcagggtctgatggcggggcagggcgcttcgccggcctcgggttagcaggcggaagttgtcttccatctgcaccagcagtccgggcaggccgaagcgttcgatctgcgccgccacgagttcgatggccaggggaataccgtccaggcgctggcagatatcaatcgccagcggcagctcggcctcgctcagttcaaagctgtcctgatgggacatggcccgctcgatcaacaattgcagggccgggtagcccagcgcctgggcacggttgccggtggcgggtgggcaggccaggggctccaggcgctgcacgtattcgccctcggcgcgcaaggcctcgcggctggtggccaggatgtgcaagcggggcgcgtggcgcagcagggtttcgctgatcagggcgatgtcgtcgagcacgtgctcgcaattgtcgatcaccagcagcaactggtgctcctgcaagcgccgcgcaaacgtgggcagggcttcgtgctcggcgtgggtgaggtcgagcagggcggcgaggttgggcaggatcatcgacggcgcgctcagtggcgccaggtccagcaagcggatgccgtcgcggtagtgcccgatcagcaattccgcgacccgcagggccaccgtggtcttgccgatgccgccggcgccggtcagggtgataaagcgttgctcgggcagttgctgtaccaggctgtcgatcagggcctggcggccgagcatgcgggtacggcgcagcggcagattgtggcacgggcgttgggcagcaccttcggttggcagggtcatcggctcgatgctcagtggcgcaacaaaactgtagccacgctgggccacggtcacgatatagcgctgcccggcctggccatcgcccaatgccttgcgcaacgccgccatatgcacccgcaggttgccgtcttccaccacgctcctgggccagacgcgggcgatcagctcctgcttgctcaccacattgccggcctgctccagcaggatcagcaggatatccaccgcacgccgccccaggcgcaatgggcgacccgcctccagcaccaggcgctggcgcgggtggatgcggtaggggccgaagtgcacggcctggtcgctgaggtcgttcatgggtggccatgctcggaacggggtgagcggccagcataggccaggcaggccaggaccactaggccgcgatcacttgcggtttagagcgagagtggtgatttcgccaggtcatcgggttgacgccttcgctgcgggtgaacatatgacagaagtgcgcctggtcgcagaagccgcattccaggctgatttgcgtcaggctcaaggatgactgggcgatcagctccttggcccgctggatgcgctgttggcggatccattcctgcggcgacagcccggtggtgcacttgaacgcacgggaaaaatggctgcgcgacagcgcgcaggcctgggcgaggtcggcaatggccaggctttcgccgaggttggccaggatcagctgtttggcgatgcgctcgcgccgtgggcacaggccaccggtggcggacacgcgaggggcgtattgatcgagtcgggccatgacaaatatccgcagtcgatgggagcgttcccggtggatggatgcagtgtagacgtggccaatcttgttgccggaccgtccggctgacgagttaatcgttgttaatttcgccaggtgccgaccaggaaaagacagcacaggcgtgcaatgtggccggcgccttgcgtgtttatctgtgagcttgccaaccgtgtggatatcaccatgaatcgcaacgacctgcgccgcgtcgacatgaacctgctggtgattttcgaggcgttgatgttcgagaagaacctgacccgggtcgccgaaaaactcttcatgggccaaccggcggtgagtgcggcattgggacgtttgcgcgatctgttcgacgacccgttgctgctgcgcaacggccggggcatggagcccacgccacgcgccgtggcgatactcaaggagttgcaaccggccatggacaccatttccggcgcggtcagccgcgcgaaggatttcgacccttccagcagttgtgcggtgtttcgcattggcctttcagacgatgccgaattcggtctgtttccgccgttgctcagtcaactgcgcgaagaggcgccgggcattgtcgtggtggtgcgtcgggccaactatctgttgatgtcgtcattgctggccagcggcgagatttcggtgggggtgagctacaccacggaattgccggcgaatgccaagcgcaagaagctgcgggatattccgtgcaaggtcttgcgtggggatggcggtgttgaaccgctgaccctcgacgactactgcgaacggccccatgcgatggtgtcgttttcgggggacttgagcggcaacatcgacctggacctggcacgcattggtcgtacgcgccgggtggtgttggcggtgccgcagttcagtgggttgcgggcgttgctcgccggtacgcagattattgcgacggtgccggattatgcggcgtgtgcgttgacggaggggacgtcgctacgggcgcaggacccgccgtttgcgattgatgcggcggagttgtcgatggtgtggagtggggtgcatgacaatgatccggcggagcggtggttgagggggaggattggggagcatatggctcgggtggtttgactgggtacatatccgttgcttcggtaacggctacttatggttccggtccgtacagaagagcgcaaaaagtaaccaaaaacgcttcgccccaacactcggcacctcgcctaggctcggtgttccctcactccggccagcgtgtttgacggggcgccccagatcaaaagcaagagcgcggcggccttagagccgaccggattgaatggccggtactcggtcaaagtgtgggagggggcttgcccccgatggcagtgggtcagtcactgatgagttggctgacacaccgccatcgggggcaagcccc

SEQ ID NO: 113 - DNA, 254504 bp, Pseudomonas nodulensis
  misc_feature (180788)..(180814): n is a, c, g, or t
ccccgatggcagtgggtcagtcactgatgagttggctgacacaccgccatcgggggcaagccccctcccacagtttgatcttcatgtatcagttgaagggtggtttgctctggctctggtttttgatcttaggcggccccccaaatcactgtcggattacgggcacaccgagcctaagcgaggtgccgagtgttggggcaagagcgctttggttactttcgcgcttttcgaaagtgacccgccgtaagggcggaaccataagccgccgttaccgaaataacggatatgtactcaaccccagcacccaaaaattggtcacccattcttacccaaaattggctattcctcccccaaggcccgatgactaacctagccatcaatccccaccgccctggagcatcaccatgcaaccccgtaccgatttctacaccgcctccccagacgccatgaaagccatgctcgccctggaagccgccgtcggcaaactgtccatcgaactaccgttgctggaactgatacgcctgcgcgtctcgcagatcaacggctgtgccttctgcctcgacatgcacaccgccgacgcccgcaaaggcggcgagaccgaacgccgcctgtacaccgtgtcggcctggcgtgaaacgccgttcttcaccccgcgtgaacgcgccgcgctggcctgggccgaaagcctgaccctgatcagccatacccacgcaccggatgaagacttcaacgcactggccgccgagttcagcccccaggaacaggtcgacctgagtgtggccatcgccaccatcaacagctggaaccgcctggccgtgggttttcgcaagatgcctaagtaagcctcagaagttgaccgaggcactcaggcgcgccgtcaatggcgcgccctggaacaggtagtcatcgcccatgtactcgcccgcgtcgcgccagtagcgcttgtcgaacaggttgtcgacgctcaggcggaacaccgtctcatagccgtccacttgggtggtatagcggctgcccacattcaccaccgcgtagtcccccacttccacattgccgctgcggttggcgtacttcttggcgctgtattgcactccgcccaataccgccaggccgttcacccacggcaacgcataatcggcatacacactggcgcgcaacttgggcacgttgatcgcctggtggccttcgtagtccggcgtgccgctgccggtcacccgtgcgcgaatcgccgccacgctggttgcgatctgcaggcgttcggtggcccagccgttggccgacaattccagcccggtgttcttttgctcgccctgttgcacgtagtcgaatttaccggtgccatccggcttggcgtactggtaggcctggcgggtctggaatacagcggcggcgaagctgatgcggcgccagtcgtatttcaccccagcttcgatttggcgtgaggtggtcggggcgagcgtttcgtcggtgttgttggcgaaccacggcgcggtgccgcccagggacaggcctttgctgtagctggtatagagcgagatgttctcgacaggtttgtagatcaacgaggcctggggcaggaacacgtactgctgggtatgacgggcctggttgccggtgacgctgtcgaaggccttttcatccaggcgcacttcacgaccgccgaggatggtttgccattgctcgttgaaacggatgcggtctgtaacgaacaggccgtactgacggctgtcgaggttgcggtggctgtcgttcaacggcttgtcagtcggggtaaacgtaggggcgtccacgtcgatgttggtggtgccgatgtattcattgacggatttgcgcttgtcgatcacccggcggaacgcactggtgccaaaggtcagttcatggcccaggccggcggtgtcgaacagcccggtcatggccgcctgcacttcgtcgtcacggcgggtgtcgtcagggctgcggtagtcgtagacgtcgtagttgccttcggggctgaagtagtttggcacgctcgaggtgcaactggtcgagccatagcagccccaggcaaacgagctgtaatcgtcgatcaccaccttgctgcgcgccgcactcacgctgcctttccactggtcgttgaaacggtattcaaacttgccgttgaggttcagcgaatcaatgcccacctgcctggacccactctgatgccccagcagtttcttcggcgaggcaccgtgtggcacctcggtgccgcccagcaactggtagcccggtaccgagcgttgctgcttgttctggtattcggcatccagttgcaacacggcgtcggggctgatgttccagtcgaaggccagggacataaaatcgcgctggccgttggcgtgttccacgtacgcgttgaggtcctcgtgggccacgttggcgcgcaggccgaattgttgctcgctgccgaaccagccgccgacgtcggtggcgatataaccgctgccacgatcgtcggtggagatggtcaccgagcgcacgtcttccgggcgcttggtcacgtagttgatcacgccgctcggctcggagatgccactttgcaggccggccaggcccttgagcacttcgacctgctgcttgttctccagcgcgacgttctgctcgccggtgatggtgcgcccgttgatcttgtagctgctcgccgcattcagcgaaaagccgcgcaccacgaagttctcgtagtagccgatgggcgcatagctgtcgcccaccgaggcgtcgttgcgcagcacttcactgagcaggcgcgcttgctggtccttgatcagtgcggcgttgatcaccgtgatcgaggccggggtgtcgagcagcggtgcctcatcgaagccgcccaccgaagcggtttcgctgcggtagccggattcatcctggccctggaccttcacttccggcagttcaaggtcagccgccaggctgtgaccgatgccgccgctgagcagcaaaccgagggcgaaacgtgaggtgacgacgggacgaaaacgcaaaaccatgggggcagggccttaaagcgcgggcggggggcgcataagctaggcataagtgcgcagttttacaagttcgcgagaatgattcgcggcttgagacatcccgtctcacaccacacgccaatccatccgcgtctcgacagcccgccgggcacctgcgatagacaaggcttccctcatcaattgcaggagaacgccatgagtattgctggaaaagtcgcgctggtgaccggcgccgggcagggcattggccgggccattgccctgcgcctggcacaggacggtgccgatatcgcgctggtggacatcaatggcgccaagcttgaagccgtggccgccgaagtcgtcgcgctgggccgcaaggcctcggtgttcgtcgctgacgtgtccaagcgcgaacaggtggcggcggcggtggagcatgcgcaccagaccctgggtagtttcgacatcatcgtcaacaacgccggggtggcgcagatcgattcgctgttggacgtcagcccggaacaggtcgagcgcaccctgggcatcaacgtgcagggcgtgttgtggggcatccaggccgccggcaagaaattcaaggcgctcaagcagaagggcaagatcatcaacgcctgctccatcgccggccatgaaggttttgcgcttctgggagtgtactcggccaccaagtttgccgtgcgtgccttgacgcaggcggcggccaaggaactggcgagcgccgggattaccgtcaatgcctactgtccgggtgtggtgggcaccgatatgtgggtcgagatcgacaagcgcatggccgagatcaccggtgccgaagtcggtgcgacctacaagaaatacgtggatggcatcgccttgggccgggcgcagacgccggaggatgtggcggggctggtcgcgtacctggccgggccggatgcggactacatgaccgggcaatcgccgctgatcgacgggggccttgtctaccgctgacatctcagatgtacccagtccaatgtgggagggggcttgcccccgatagcagtgtgtcagccactggaagtattagctggtccaccgccatcgggggcaagccccctcccacagtgttgaccccgttgtatcagcgggttttgttcggcatgtcgatgcccagttggttgacgcggcggtacagggtcgcccttgagatccccagcgcctgcgcggtcggtatcggcttccagcgatgccgaatcagcgcatccagcaccacctggcgctccgggctcgcacgatcttccgtcaatgcttcaacctgttccccacgcacctccaccggcaaatccgccacctgcaccgtaccgccctcacacaccgcacaggcatacgccagcacatgccgcagttgccgcacattgcccggccacgcgtaccccaacagcaactccagcgcagcctggccgattcccaccgtgatgccgttgttgcgcgcttcctgttccagcaagcggttgatcagcgccagtttgtcagtgcgttcgcgcaacggcggcaggcagaagcgcgcgcagccgaggcgaaagtacaggtcctcgcgaaagctgccctcactgaccaacaccgacaaatcgcggtggctggcgcagatcacctggatatcgacggtgcgggttttcgcggcgcccagcggcgccacttcaccttcggccatcacccgcagcaggcgcgtctgcaaggccaggggcatgtcgccgatttcatcgaggaacacggtgccgccatcggcctgcaccagcaaccccggcatgcctttgctggcggcgccggtgaaggcgccagccacatagccgaacagctcgctctcaatcaggttttccggaatcgccgcgcagttcaccgccacgaacggcccactgcgtcgggcgctgcgttcgtgcaactggcgggcgaagacttccttgccggcgccggtttcgccttgcaccagtaccggcaggttgcggtccttgacccgcacggccaggcgcaggtgttcctccacacgggcatccaccaagggcaccatgggcgcccgcgccggtttgcgtcgcggcgcgttgacccgcacgtgcagcgcacccggttctcccagccactgcagttgctgggtggactggtcggtgacggcgcgcaaggcgttcaggtcgaacacctcaccgatatgtgccggcacctggccaaagcgccggcgcaaggcctggcgcgccttgctgttcaaggcccgcagacggccgtcctggtcccaggccagcagcaggtcgggctggctgtccacataacccggcgtgctgtgcgcttgcaacacccagtgctggcgggcgctgtgcatgaagaaggcgttctcgatggcctcggcactttgcgccaccaactggcgtatcaggtgctggctgcggcggtcatctggcgatttgagcgccgaggcatccatcactcccagcaggttgccctgggggtcgaagatcggcgcggcggagcaggtcaggccgatgaaggctgcacgaaagtggtcgcgcttgtgcaccgtcaccgccgattgactggtgagcacggtggccacgccgcaagtgccttcttcggcttccgaccagcaggtgccgaggtacaggccggccttgcggcagtcgctgcggatcgaggtgtccacgcggtggtcgatggtctggccctgggcatcggtgagcatcacgcagtagtcggcctggcgcacacggtgatgcagttgcccgacggcttcgccggcaatgcgcatgaacagttcggcgcgttcgcggcattccttgagcaagggttcgctgaggatgcgtggcccctgcagggagccggggtccaggtggtgttgctccatggagcgccgccatgaatcgaagatcagcgacggcaccggcgcctggggcagacgatcagcattgcggaccacgcgactgacgcagtcgacgtgctccctggagttcgcggcgagcataaggcctccggttctcgatctttgttgttatacccgccattaagcgcgcatgcgtcgggtgggacaagcgcggcctgaccaactgcccggtatgagacgcagcgtctcaaaccggctgagacgccgccttcgagttgcaatgccgcgtctcattctgcgacgccggcctgcttgcgacaaccgctctggatcaaggttatgccaggttttttacggccttggcacaggctgtgctgaaggccttgtagctgaccacgatcagccttttgtgtgccgagacaacctggagaacaacaagatgtccactcacctgtccaccgatcaactgctgcatgcctataccgtgatgcgcaccatccgtgatttcgaagaacgcctgcacgtggaattcgccaccggcgagatccccggtttcgtgcacctctacgccggtcaggaagccagtgccgccggagtcatggcccacctcaacgatgaagactgcatcgcctccaaccaccgtggccacggccattgcatcgccaagggcgtggatgtgttcggcatgatggccgagatctacggcaagaaaaccggtgtgtgtggcggtaaaggcggctccatgcacatcgccgaccaggagaagggcatgctcggcgccaacggtattgtcggcgcgggtgcgccgttggccgccggtgcggcgctggcggccagactcaagggtagccagggcgtggccgtggcgttctttggcgatggcggctccaacgagggcgcggtgttcgaggcgatgaacctggcctcgatcatgaaactgccgtgcctgttcgtcgcggaaaacaacggctatgccgaggccaccgggtctggttggtcggtggcgtgcaaggacatcgccgagcgtgccgtggggtttggcatgccggggatgatcgtcgatggcaatgatttcttcgccgtgtacgcggcgcttggtgttgccgtggagcgtgcgcgcaagggcgacgggccaaccttggtcgaagtgaaattgagccgcttctacggccatttcgaaggcgatgcacaaacctatcgtggccccgatgaagtgaaaaacctgcgggaaaacgccgactgcctggcgctgttccgccagcgttgcagcgccgaaggctggctggacgcggcgcaattcgagcgcatcgatggcgaggtcgcacagcttattgacgacgccgtgcgccgcgccaagtccgaccccaagccccaggccgccgacctgctcagcgatgtctacgtcgcctaccactcataacaacaacattcgtggagagaactttatggctcgcaaaatcagctaccagcaggcaatcaacgaagccctggcccaggaaatgcgccgcgaccagagtgtgttcatcatcggccaggacgtgtccggcggcacgggttcccctggcgaacaggacgcctggggcggggtgctcggcgtgaccaagggcctgtatccggagtttcccgaccgcgtgctcgatgcgccgctgtccgaagtcggctacgtgggcatggccgtcggcgccgccacccgtggcatgcgcccggtgtgcgaattgatgttcgtcgacttcatcggctgctgcctcgaccagttgctcaaccaggccgccaagttccgctacatgttcggcggcaagaccaccacgccgctggtggtacgcgccatgtacggcgccgggctgcgggccgccgcccagcattcgcagatgctcacgtcgatgtggacccacatacccggcctcaaagtggtgtgcccggccacgccctatgacgccaagggcatgttgatccaggcgatccgcgacaacgacccggtgatcttcctcgaacacaagatgctctacagcctgcaaggcgaggtgcccgaagagctgtacaccgtgccctttggtgaagccaattttgtccgcgagggcaaggacgtgaccctggtgacgtacggacgcatgctgcacatcgccctggaagccgccaccagcctggcgcgccaaggcatcgattgcgaagtgctggatctgcgcaccaccagtccgttggacgtcgacagcatccttgaaagcgtggaaaagaccgggcgcctggtggtgatcgacgagtcaaacccacgctgctccattgccaccgatatcagtgcgctggtcgcccagcagggtttttctttcctgcgcgcgccaatcgaaatggtcaccgcgccgcacacgccggtgccgttctccgatgcgctggaagacctgtatatccccaacgccgcaaagatcgaagccgcggtgctgcgaatcgccaacaagaggagcgccgcatgatccataccttgaccatgcccaagtgggggctgtcgatgaccgaggggcgcatcgatatctggctcaagcaacccggcgaccgggtggagaagggcgaggaagtgctggacgtggagactgacaaactctccagcagtgtggaggcaccgttcagtggcgtgctgcgccgcgtgcttgcactgagtgacgagacccggccggtgggcgcgttgctgggaatcgtggtggaaggcgaggccagcgaagcagagatcgatgcggtgatcgaacgcttcaatgccggttttgtttccagcagtgccgaaaccgaagcgtcgggaccgagtgcgcagaaggtcgagatagacgggcgcctgttgcgctatctcgagctgggcgaggcggggacgccgttggtgctgattcacggattcggtggcgacctgaacaactggctgttcaaccaaccggcattggccgtcgagcgccgggtgatcgccctggacctgccggggcatggcgagtcgggcaagcaactgcgcagcggcgatgtcgaggaactgagccaggcggtgctggccttgcttgatcacctcaagttcgaccgcgtgcacctggccgggcattccatgggcggactggtcgcactgaccgtggctgaccaggcgcccgcgcgtgttgcctcattgaccctgatcgccagcgccggtctcggcccggatatcaacggtgattacttgcaggggtttaccgaagccaacaaccgcaatgcgctcaagccgcaattgacccaactgttcagcgacccggcgctggtgacgcggcagatgctggaggacatgctcaagttcaagcggttggaaggggtggcgcaggctttgaggcaactcaatgcccagttgttcgagggagggcgccaacgtctggatctgcgcaaggtggtggggcagcaaccgagtctggtgatctggggtagcgacgacgcaatcatccccgtcagtcatgccgaggggttggacgcccaagtgcagattctgccggggcaggggcatatggtgcagttggaggcggcggaacgggtcaaccaactgatggccgccttcctcaaatcccaaccttgaaatgcagcccaatgtgggagggggcaagccccctcccaccatttggattggatttcaaacggaacgcttcagggtctcgctcggcaactccttgaacaacgcccgatagctattggaaaaccgccccagatgccagaacgaccagttcatcgccacctcggccacggtggtcccggctgaactcagcagttcccgccgtgccccattcaatctgcgcaagcgcagccactgcgccgggctcatcccggtgtaggtcttgaacccttgctgcaactggcgcaatggcacgccggcaatctgcgccagttccagcaggttgacggtctcgtccggcgcgtccgccgcccattcgccgatgcgcgccatcagccggcgttcctcgctgcggcgctgcaaggaactgcggtccaggcacacgcaggcgttgtcgaggatgaacaggcaatcgtcgagcaattgctggataagcgcggcggggtcgctgatcgtggacaagcgtgtcagcgtgccactcagccaacgggcgaacaacgcgttctgctggccggtcagtggcgccatgaacaaaccttccagcttcgccacctccaacccatggcgctgcacgaactgcgggccgaacaccaccgccacttcacggtagttttccggggtgatccaggtgttacggctctcgccattgagcaggtacagcgcgttgtcgctgccgtcgaaacagaacgccagggagccggcaggcgcattgaagtgctgttcgacgcgggtgttcatgcactcttcgtacacctccacgccttgcaggtcgaggtagcggatgcgcccggcgaaatgccccggggacatctgctggtactgctgcacccagccgggtgtcgcactgcattgagcggccacatcaccggtggtgaaggcctgtacgcgcaaagcggttgcctgtgtcatggggagcctgggcgcactctattggtgcgttgtggtgcgtgcaaagtggatagatgccggcgggcggcggcctcaagatagacctcaatgcgccaggagtacaagccggcgcatgcacccaacccatgccgaggtccttatgaacgcccccttcgatcagctgtccgcctggctgaaagaacacaagattaccgaagtcgaatgcgtgatcagtgatttgactggcatcgcccgcggcaagattgcgcccaccaacaagttcttgcatgagcgaggcatgcgcctgccggaaagtgtgttgctgcaaacggtaaccggggactttgtcgacgacgagatctactacgacctgctcgacccggccgatatcgacatggtctgtcgcccggtgtcccacgccacttatgtggtgccgtgggccatcgagcccaccgcaatcgtgatccacgacaccttcgacaaacagggcaaccccatcgagctgtcaccgcgcaatgtgctgaaaaaagtcctgcagctctacaccgacaagggctggcagccgattgtcgcgccggaaatggagttctacctgacccagcgttgcgaagacccggacctgccgctgaaaaccccggtgggccgctccggccgcgccgagaccgggcggcagtcgttctccatcgacgccgccaacgagttcgacccgctgttcgaagacgtctacgactggtgcgaagcccagggcctggacctcgacacgctgatccacgaggacggcccggcgcagatggaaatcaacttccgccatggcgatgccctcgacctggccgaccagatcaccgtgttcaaacgcaccctgcgcgaggccgcgctcaagcacaacgtggccgcgaccttcatggccaagccggtggccgacgagccaggcagcgccatgcacctgcaccagagcgtggtggagatcgccaccggcaaaccggtgttcgtcgatgccgacggcaacaagagccagttgttcctgcaccatatcggcggcctgcagaagtacatccccaagctgctgccgatgttcgcgcccaatgtgaactcgttccgccgcttcctgccggacacctcagcgccggtcaacgtcgagtggggcgaagaaaaccgcaccgtcggcctgcgcgtgcccacctccagccccgacgccatgcgcgtggaaaaccgcctgcccggcgccgatgccaatccgtacctggcgattgcggctagtctgctgtgtggctacctgggcatggtcgagcagatcgaacccagcgcaccagtggaaggccgtgcctacgagcgtcgtaacctgcgcctgccgttcaccctcgaagatgcgctggcacgcatggaggactgcgacacggtcaagcagtacctgggcgacaagttcgtgcgcggctacgtcgcggtcaagcgcgccgagcacgagaatttcaagcgggtgatcagttcctgggagcgtgagttcctgctgttgagcgtctaaaaaaccaataaaggggtgtcgatatgcgtcttgtgaaacagcttttcccgctggccctggtggccgcgttcagcagcgccagccaagcggcgccgacagtcagtatctacaactggaccgactatatcggcgagaccaccctggccgacttccaggccaagactgggatcaagccgatctacgacgtgttcgactccaacgagaccctggaaggcaagttgctcgccggccgcaccggctatgacgtggtggtgccgtccaaccacttcctggcgcggcaagtgaaggccggtgcgttcctcaagctcgaccgcgcgcagttgcccaacttcaagaacctcgaccccaagctgctcgcgctgctggagaaaaacgacccgggtaacgcgcattcggtgccgtacctgtggggcaccaatggcatcggctacaacgtcgacaaggtcaagcaggtgctgggcatcgaccatatcgactcatgggcggtgctgttcgaaccggagaacatcaagaagctcaaccagtgcggcgtggccttcctcgattcggcggacgagctgttcccggcgatcctgaattacctgggcaaggatccgcgcagcgagaaccctgaagactacaagcaggccgaagccaagctgttgacgctgcggccgtacatcacctacttccattcctccaagtacatctcggacctggccaacggtgatatctgcgtggctttcgggtattccggcgacgtgttccaggccgccaaccgcgccaaggaagccaagaacggcgttcacatcgcctattcgattcccaaggaaggctccaacctgtggttcgacctgctggcgattcccgccgacgcgagcaacccgaaagaagcccacgccttcatcaactacctgctcgacccgcaagtgatcgccaaggtcagcgcctcggtgggttatgccaacgccaatccggcggccaaggcgttcatggaccctgagttggtgaacaaccccgaggtatacccgccgcaggcggtgctcgacaaactctatatttccaccacgccgaccccggcgaccatgcgcctgatgacccgcgcctggagcaaagtgaagaccaacaaatgatgcagtcgactgaccacgcccggtcctactaccgggccacggccaacgccctgacggagcgccccgcattgggcgccgacttgagcgccgatgtgtgcgtgatcggcggcgggttcactggcgtaaataccgccatcgaactggcccagcgcgggctctcggtgatcctgctggaagcccggcgcatcggctggggcgccagcgggcgcaacggcgggcagttgattcgcggtatcggccatgacgtgtcgggatttgccaaatacgtgggcgaggagggcgtgcgttacctggagcgcgccggtatcgagtcggtggccttggtgggcgagcgcattcgcgagcatgggattgactgcgacctgcgctggggcttttgtgaattggcgaacacgcccgcgcaattcgccgcgttcaagggcgagcaggcgcacctggcggagctggggtatgcccatgaaacccgcctggtcggcgtgcaagatatgcagcaagtggtcggatcgacggtgtatgccggcggcctggtggacatgggttccgggcaccttcacccgttgaatctggtgctgggtgaagcgcagttggctgagtctcttggagtgcggatcttcgagcacactgaggtgcttgaactgatccacggcgacacggtgcaagtgcgctgctcaggcggcacggtacgcgccgaccacctggtgctggcctgcaatgcccatctggaggaactggaaccgcgcctgagcggcaaggtgctcccggcgggcagctacatcatcgccaccgagccgttgtcggaagatgtggccaaccagttgatcccgcagaacctggcgctgtgcgaccagaaagtcggcctggattactaccgattgtccgctgaccgccgcctgttattcggcggcgcctgtcattactccggccgcgatccggtggacatcgccgcttatatgcagccgaaaatgctcaaggtgttcccgcaactggcccagaccaccattgagtttcagtggggcggcaagatcggtattaccgccaaccgctttccgcaggtggggcggttgaagcagtaccctaatgtgttttatgcccagggctattccgggcatgggttgaacgtgacgcactggtgtgcaaggttgttggccgaggggattcacgccggtcacagtgccggcctggatattttcagccaggtgccgcatatgaccttcccgggggggaaggcattgcggtcaccgctgttggcgttggggatgatgtggtttcggttgagggagatcgtgcagtgaagcgttgcaataaggactgaatagctacattcgaacgcgatttgttatgtccccgaaaggagggcgagtgtaggcaaacctcttattaaccacgcaggtcactatagatctttcgttggcgatgttctttgggttttcacatatccataggcttttgacgggcccctgcgtgttggcgagactcgtgagtggggttgcaagagctgttgtgaatatgggcaggcccaacacaatgctcaatataggtaaggtccaagtattgtgtttcattgaggtgtttcccgaaggcagtttcggagaatggtttcctttttcaaggcaacatagcccctaccgcatcgaagttaacggccgcatcggtcgaggatcccactgcgtacgcgcctgcgggtgaaatgctattcaggttgctgctcccccctggcgtaaggggcgatatggcgaccgtgcccgccgagggggtccaatagcacgccgtggataattggttggcgttaacacaattcaaggcaacggtatcgttgttggaaaaaccaactgcttggatcagattgttgccgggcagcggattgaccggttgcacggtgaaagagtttgcagggtcttgccagtaaaaaggtatatcaagtcccgtaggttctttgccgtacgccaatacatgcccaagatcattgatcgccacggcgtggttcagtgcattcagaggcaacgtcaggagcaaaggtgtttggtcataaaactcccagaaggcggtttgccgtgtgtcggcggccgacccgggaaacgtgcaggtgcctgcaatcctgccctgattgttcatgtctacggcaaagcagtaaatggctcccgtcggtagcttcgcgggttctaacgtatagccgctaccgttccacctggcgaccttgatgacgggagggccgtctggtccagggcaattcaacaggataagcgggcgcccgccgaacagggtttcggtcaagtcaacgccagtacagttgtcgccccagcccgacacccgctctggcgtggagttacccgcggtgtagatcaccaccgtcggaactccgcttgcgctcaggcttcgcgccacaaccaccccgttctgattttgtgcggttggcgtcgtttgtttgtcagccgggcgcaacagcgggaacagcaaggtgcctggcagcggattcataggtgttggtgtaacggctggggttgcggggttccaaaaaacgccgaacaggacgccaaggctgttggcgcagacccccactatcgaattattgctggtgttggcgatagccgatacttggcaaggctgacctgcggccagcggcgccagcttttgctgggggcctgccagtgttgccgagtaccatggaccgatgttggcactgggtgttgtcgaactgcagtcgcccactatttgcccgctgtcgttgcccccaatcgtctcgcattgcactccggcagcatggcccgaactgacgaatgtcgccgcactggcactcaatccatacccgcaaagcaacacacccacactcaacaccatcggtgcaatcagttgtctcaacaaacgttgcataatccgtccttccctggctgacagaatgacccactgggggtgaacccccacggtccctgaatgccagtaaacgccaggttcgatggacgcacaactgtcacttctgacaggtacaggaggagttgccttaagcctcggtcagcactttcctgaacgtttccaccaacggccgcaaattgacccgatgccacgccacccacagtggcgtggtgtacgtcagccacggtaattcgcgcaagatcacgccgggcggtgcattgcggctcaggcctttttgcaccatcgccacacccaaccctgaagccaccaaccccagcgcggtaaacggctcgctcgcttccatggggatctgcggggtgaagccggcgcggatgcaggcggcgacgaagtcatcggcggggttggcgccgggtttgcgctgcacgccgatccactcctggtcggccaggtgttcgggcaacatttcactcaggcgtgccaagggatggtgctcgggcaacgccagcagcatcggttcgtccagcacctgcaaggcggtcaggtccggatcatcggcggccggcggttcgccgaccagggcgatatccaggctgcgttggcgcaggccttcgagttgttcgagggacggcaggttatacagcttgatgtgcacgttcggccggtcgtcgcgcagtacccgcagcgcgttgggcagcacaccggcatgcatggcgttttcgatatagccgatgcacaggccaccttcttcaccgcggcccaggcgcttgcccagtgattccaggcggttggcgtgggtcagcagcgccttggtttctgccaggaacgtctggccgtcacgggtcaggcggatgcgttgctggctgcgttcgaacagggtcaggcccaggcgttcttcgagctgggcgatctgccggctcagcggcgactgggagatgtgcaggcgttcggcggcgcggccgacgtgttcttcttcggcgaccacttcgaagtagcgcaattggcgtagatcgatcatgtaagacctatggggactcaagttggtcgcagtatgtcttggacggtccgacctctgcaatctagcatctgttccacggtcacagcgaccctttgtactgttgagaatccatcatgaacttgaaagacaaactgcccggcgtccagggcttcggcaccgcccgtcctgccgctttaacttcaggagttcaaccatgaaaatcgatgtaagcggcaaagtagcgattgtcagcggcagcactgccgggatcggcctgggcatcagccaagcacttgcagcctccggcgccaccgtggtggtgatcgggcgtgaagccggcaaggtcgacgatgcactggcgagtatccgtcaggctgtcccaggcgcagacctgcgtgggctggtggctgaccttggcaccgcagagggcgcagagaaactcttcgccgccgaaccgcgtgccgacatcctggtcaacaatctgggcatcttcaacgatgtggattttttcgatgccccggacagcgaatggacgcgcttctatgaggtcaatgtgatctccggtgtacgcctggcgcggcattatgtgccgggcatggtcgggcagggctggggacgggtgatcttcgtgtcgtcggaatccggcgtggccaccccggcggacatgatcaattacggtgtgaccaaaagcgccaatttggcggtgtcccatggcctggccaagcgcctggcgggcacgggagtgacggtgaacgccgtgctgcccggcccgacctttaccgacggcctggagcagatgctcagggacgccacacaaaaatccgggcgcagcgcgcgggatgaggcggacgtgtttgtgcgcaatgcgcggccgacatcaatcatccagcgcgcggcaaatgtggatgaagtcgccaacctggtggcgtacattgcttcaccgctttcttctgcgacaaccggtgccgcattgcgcgtcgacggtggtgttgtcgacagcatggcgatctgaattgtttttcattttctggagtatttatcgtggcaacagcctcttctgtgattgaaatcccggtgtcggccgatcaggtctggcaattggtcggcggcttcaacagcctgccggactggttgccgttgattgtcaaaagcgagccaagcgatggtggccgtgtgcgtcacctgcaaacggcggacggcgcagtgatcgtcgagcgtttgcagagctttgataacgtcggacgtacctacagctacaccatcgagcagtcgccgtttccggtgagtgcgtatctggcgacgttgcaggttgaggcgctgacggacgcttcggcgaaagtgacctggtccggtgtgtttacaccagtggcggggactacggatgcggcggttgaggagctgtttgccggtgtctacagcggtggtcttgaggccctacgcgccaacttcccggcctgatccagtccaatgtgggagggggcaagccccctctcacattgggacgcccatgttctcaggcctcgggcatcagttgctggcggcactccagaaccaatctggcaccgccttgctcactcgtacccacgtccaacttgaagccatgcaagttgatgatcgccgccacaatcgacaagcccaatccaaacccaccttgctggtcgctttcatccacgcgatagaaacgctggaacaccgcatcccgctctgccgccggtatgcctggcccggagtcgtgcacttcaatgcgcgtgctgcccgcatcgttgaccccgcgcagaatcaccgcgccgcccgggggggagaacttgatcgagttgctcagcaggttggccagggcttcgaacaacagggcgcggtcgccggtgatccatggcagggactccggggtttcgagcttcagttgcagttcaccttcttcggccagtggcaggtagaagtcgtgcaactcgcgcagtagcggcagcgggtccatgaccaggaaaccggagcggcgctgatggtcctccagctcggagatgcgtaacagcccgcgaaagcgcgccatcagggtgtcggtctcggcaattgcatcgtcgagtttcaccgcgtagtcggactcggcctccgcctcctgcttgatgcgatacagctgcgcacgcaggcgcgtcagcggggtgcgcaggtcgtgggcgatgttgtcgcacacgcccttgacctcgttcatcagcttctcgatgcggtcgagcatggcgttgacgatggccgcgagcatgtccagttcgtcacgccggttggacagcggcaggcggtgggtgaggtcgccggcgacgatggcttcggcgctggcctggatcccacggatacgccgcaacgggcggcggcgcagcaagtgccagccggccgcgccgggaataatcgtcagggacaatgcccagagcagggcatgccagatgatccgggtcacgccgaacagcgaaccgttggcccgcaccagcaccagccaacggccgtcttcggtgtgagtggctacggcgtcgcagctgtctttgggcaatttggggtcgtcggactcgacgcaattggccagggcgtggatcttgccgtccagcggcaggtccggcgggatcgcacgaatcggcccgctcaaggggcggaattgttcatcgaacaggccgtaggcatccacgcccttcatgtcgaaggtcatgctggtggtcagggcctccaccagttcctcgccgtcgaagcgctggaacaggtgctggcgctgcatcagggagtggcgcgacaggtcgcccaggtaaccggacacctcgtaatacagcacccccatgaggatgcagctccaggccacgaacagcgagctgtacagcgccagcaggcgactgctggaggagcgccagcctttagaggggttcagcaatgacataaccggagcctcgtaccgtgcggatcagcggcgtgaggcccggtgggtcgatctttttgcgcagacggccgatgtgcacgtcgatcaggttggtgccggggtcgaagtgatagccccagacttcctcgaagatcatcatccgcgacaggatctgcccggtgttgcgcatcaggaactccagcagtttgtattcggtgggcagcaggctcaggggttgatcggcgcggctggcttcgcggctgatcaggtttagctccaggtcggccacacgcagggcggtttcgaattccttgaccgtacttttgcgtcgcagcaacacctcgacgcgggcggccatttcatccgaggcgaacggcttggtgaggtagtcatcaccgccggcacgcaggccacgcacgcgttcgtcaacgtcggagagggcgctgatcatcaggatcggcgtggaaacgccgatggtgcgcagggtcgtcacgatggccaggccatcgagttccggcagcatgcggtcgagggtgatcaggtcgtaatcgccgctcacggcgcggaccaggccttcgcggccgttgtctacccaatctacatccagtccatggctactcagctcggcgacaatctcgcgggccgttacggcgtcatcctcgatggtcaaaatacgggtcataggattacctggtgagcgattcacactagaagtgggggcattttgccaagaaacggctgaatgcttcctaaataaaacttcatgttggcaaaactgacacagatttcatcgcctgccggggaatgcataacgcccgcttcaaacggccatttcttgcaagttgcatggatcaggttagttcaatttacttaattcattgaaatctaaggattttattttttgtccaggctggcatggtgcctgcactgtcccttttgagacctgtaacactatttttctgccttggagcaaaacaacaatgatcacatcctcatccacgctgcaagagtcgagcgcgctctccggggtttcctggggggcgatttttgccggggccgccgccgcggctgcgctgtcgctgatcctggtgctgctgggcttcggcctgggcttttcggcagtgtcgccgtgggccgatagcggtatcagtgccaagggcttgggtatttccacgattgtttggctggcctttacccagatcgttgcatccggcctgggcggttatatcgccggccggttgcgcgtgaagtgggccaatatgcatggcgatgaggtgtactttcgcgacaccgcccatggcttcctggcctgggccgttgccacgctggtcactgcggtattggtggtcggttcggtcagcagtgtggtcagcggtggcgtgaaagccggtgccagcgttgcagccggtgccgccagcggtatcacccaagccgccggcagtgccgccaaaggtgccaacagcggcgatttcgattactacgttgacagcctgttccgtgatgatcgcccggtcgccgtcagcgatgacgccgcccatggcgtggtggcccgcatcttcacccgcaccctgagcaacgacggccagcttgcacctgaagaccgtgcctacctggcccagttgatcagccagcgcaccaacctcagccaggcggatgccgaagcgcgcatcgacaaagtctacggtgacgcccgtaaagcggtggaagacgccaagctcaaagccaagcaagctgcggaaaccgccgcaaaagtggctgcgtatacctcgctgtggaccttcgtcgccctgttgatcggtgcgttcttcgccagcctcgccgccacctttggcggtcgccgccgcgatgccgtggtgtatgtcgaaaccgaacacttcgttcgttaatcaattcaaggagaacaacatgcgctcattactgctctggttcctcggtgtgcctatcccggtgatcatcctgattgcgatcttcatgcactgatcctcgctcaggtttctcaaggccgcgtctgtttccacaggcgcggctttttttgtcttacgggtacgaaggcttatacctgtcaagtttgacagtatcgccgggctctgaaagtgcctagtttgtttaagtcccaactcactgagagcacggtcatgaatcaaactaccggcacattgacggcaactgtcgtcaacccacaagtcattccaccgaaccaaccgtttattggcgatcccggtgaaatgctgatgtaccgatcaggtggatatatacacattgcggcaacgcaaaggttgggacccacggtcaatgatttcaacggtttcaattttcgtataccgaacatcattgcgggcagtgggtcgcacaccttcgtgcttggcgttactgctcggggtatctattgggctcatgagcttggtggtgtcacgccgtacacggctgtaaatggcagtctcactgtttcattggaccagaaggacacgttgacggggacgttcaacttcccgggagaaaacggcagccaacacatcagtgtcagtcagggccagatcgacctggcgggctttattacccagccagtaccggtacggctgccaacggttacaggtacaggctatatgcgaggagacgtcgtaggagggcctttgccaaaccagaactttgacgcggcagttgtcagcctcagggaagtcgatggcggcggcatcagcaagaactactttgaattcattggcaggcagtacaacgagttaggaattcagaactatgttgccatcttgctggacgttgaccagacggcgcttacctacgtgttagggagtaaccgtgaagcccgagctcttttcgcggtgatggactcctttgggtttgcgtatgccatcagcgggtcgttgaacttcacctctctgcctgccagcggtcgcgcagccggcagcctcgactgcatggtgcagaagaatcaggagccacccttccatgtcaatgttgtgttcgatatcacagcttaggttcagccagcggacctgatggggtaacggccaacgtctcacgcaattgttaatagcggcttaacccgtgcttggctagactcgcgccccatgagccgccttctgcgtttagtcctggtcctgctgctgagcctcacgcttcccctgacagggatggcgggtgtgccgtcgagcaccgagccctgcccgatgaaaatgtcgggcatgccgatgatgagcgacatgtcgcccgactgctgtcaggacggtgctgaacatggcaaagcctgcaagcccggccaggaatgcaagaccggtagcctgctgcaactgtccctggcggtgctcaaggcgccgttgccctcggcctatccgctgcgcgtcagcgcctcttcggaattcatccctgaccgcacgccatccggcgtctggcgcccaccccgttcctgacccctgttgcacctcaagacgcatcccctgaccgggatggttttgctgtgggccgcctgacgcggtgcacagcgcaacggaacaggaattttcaacatgaatgcctcctacatgcgcgccctggtggtgggcgtgctggcgtggccggcgttggcgagtgcgctgaccctggatgacgccctgcgcctggcgcaaaacaatgcaccgtcgctgcaggccgagtcggccaagttgcaggccgccacccaggcggcgatcccggcgggcgaattgcctgaccccaagctggtggtcggcctgcagaactttcccattggcgggcccaatcgcggcacgttgtatggcgacgagatgacgcaacagatgatcggcatccagcaacaggtgcccagccgcgacaagcgcaaggcccgggtcgagctggccgatgcaaccatcgaacgggcagctgccgaggggcgcatcgagcgcctgaacgtgcgccaggccacggcccaggcatggattcgggcgtatgcggtcgcgcgcaagcaagccttgttcaaggacttctaccaacagaaccgtctgctgcaagacaccgtgcgtgcgcagttggccggcggccgtggccaggccgccgacgcggtcatcccccggcaggaagccgccgagctggccgggcgcgacgatgagttgacccagcaacgtgcccaggcccgtgccgcgctcaagcgttggatcggcgcggccgctaacgaagctcccagcggtcaactgcccaactggaccttcgacccccacagcctgaaccacaacctgcaccagcacccggcactgcaagcctacgtgccgcgcacccgcgaagcgcaggcgcgcttgcaggatgcgaaggcgcaaaagacttcggactggagttgggaggtcgattacgggcaccgcagccgtgagttcggtgacatggtcaacgtgcagttcacctttgacctgccgatctttcccggccgtcgacagaaccccggcatcgccgccaaacaggccgaactggaccagcttgacgccgagcgcgcagccgcgacccgtgagcatacccagatgctcgatgacgacctggccgactaccagcgcctggaccgcgcggtacagcgcagccaggacagcctggtgccgctggccgaggaaaaagtcagcctgagcctggccggttaccgcgccggcaaaggcgacttgatgacggtggtcaacgcccgccgtgagctggtcgaagcccgtttcaagcagatcgatgccatcgaacaacgcgccctggtcggcgcgcagttgtatttcgcctatggggaacccgccaatgaataatcgaatcgtggccgctgtgttgctgctgggtctgggggccggctatgggctggcgcagtggcagcccggggcacccgcaatgcccgtaaaatccgacaagcaggcgctgtactggtatgacccgatgttcccgcaacagcagttcgataagcccggcaagtcgccgttcatggacatgcaactggtgccgcgctacgccgatggggcggtatcgacggctacgccggcggtgcagatcgatccgggcctggcgcagaacatcggcgtgcgcctggcgagtgtgagccgcggcgtgctgacctcccgcctggacctgtcgggcatcctggccttcaacgagcgtgatgtggcggtggtgcaggcgcgggcggcggggtttgtcgagcgggtctacgcacgggcaccgggggatgtgctcaaggccggtgcgccgttggtggacctgctgatacccgagtgggcggccgcccaggaagagttcctggccctgcggcgcagcggcgagcccggcttgatcgacgctgcccgccaacgcctgcgcctgagcgggatgccggcggggttgattgcgcagatggaacgcagcggccaggtgcagtcggtcttgaccgtgaccagcccgatcagcggcgcgctgcaaaccctcgacgtgcgcgaaggcatgaccgtggcgccggggcagaccctggcgcggttcaacggcctgggctcggtgtggttgcaggtcgccgtgcccgaagcccggggggccacgttgaaagtggggcaaaccgtgcagagccgcttcgtcggtttgccgggcgagacgctcgacggcacggtcagcgcgatcttgccggccaccgccacggacagccgcaccgtgcaagtgcgggtcgagctgcccaaccccgaaggcgccctgcgcccgggcatgaccgcccaggtcagcctggcgcagaccagcgggcaagcgttgttgcaggtgcccagcgaagcattgatccgcaccggcaaacgcgtgctggtgatgctggccgaggagggtgggcgctatcgtccggtcgaggtcgaaaccggcgcggagaaccaggatcgtacggtgatcctcagtggcttgcaggaaggtcagcaggtggtcgcgtccgggcagttcctgctcgactccgaggccagtctcaagggcattaccgccaccgctgcggaagctgcgatgaacatgcagccgggagcccagccatgatcgcgctactgattcgctggtcggtggccaatcgtttcctggtgctgctcgccaccttgttcgtcaccgcgtggggtgtctggtcggtgcagaacacacccgtcgacgctttgccagatctatcggatgtgcaggtaatcatccgcaccccgtacccgggccaggcgccgcagattgtcgagaaccaggtcacgtacccgatgaccactaccatgctctcggtgccgggggccaagaccgtgcgcggtttttcgttcttcggcgacagctacgtgtacgtgttgttcgacgaaggcaccgacctgtactgggcgcgctcgcgggtgctggaatacctcagccagttgcaggcgcggctgccggcatcggccaaaccgtcattggggccggacgccaccggcgtgggctggatctaccagtacgccttggtggaccgcaccggccagcacgacctggcgcaattgcgcgcgttgcaggactggttcctcaagttcgaactcaagaccctgccgaatgtggcggaagtcgccaccatcggtggccaggtcaagcaataccaggtgcagctcgacccgctggccctggccagtcgcggcatcacccaggcgcaggtgaaagcagcgattgaccaggccaaccaggaagccggcggctcggtattgaacctgggcgagtccgagtatgtggtgcgtgcctccggctacctgaagaatctctctgacttccgcgccatcccgctgcgcctcgacgccaacaatgtaccgctcaccctcggcgatgtggcgaacatccagctcggcccggacctgcgccggggcatcagtgagctggacggcgagggcgaagcggtcggcggcgtggtgatcctgcgcagcggcaagaatgcgcgggaagccatcgcggcggtcaagaccaaactggaacagttgaaaagcagcctgccgcccggtgtggaaatcgtcaccacctacgaccgcagcaagctgatcgaccgtgccgtggacaacctcagccataaactgctggaagagttcctggtggtggccctggtgtgcgggattttcctgtggcacctgcgctcgtccctggtagcgatcatctcgttgccggtgggggtgttgatcgcgtttatcgtcatgcgcttgcagggcatcaacgccaacatcatgtccctgggcggtattgcgattgccatcggcgcgatggttgatgcggcggtggtgatgatcgaaaacgcccacaagaaaatcgaagcctggcaccacgccaaccctggccgggaactcaagggcgatgcacattggaaggtgatgacggacgcggcggtcgaggtcggcccggcactgtttttctgcctgctgatcattacgctgtcgtttattccggtgttcaccttgcaggcccaggagggccggctgttcgggccgctggcctacaccaagacctacgccatggcggccgccgccgggttgtcggtgaccttgatcccggtgctgatgggctactggattcgcgggcgcatacccgacgagcaacgcaacccgctcaatcgcggcctgatcaagctctatcagccggcgctggaggcggtgctgcgctggccgcgcatgaccctgctggtggcgctgctgatggtggcgagcgcgctgtggccgatctcgaaactgggcggtgaatttctgccgccgctggatgagggcgacttgttgtacatgccttcggcgctgccgggtttgtcgacacagacagcgggtgaactgctgcaacgcaccgaccggctgatcaagacggtgcccgaagtcgcccatgtgttcggcaaggccggccgcgccgaaaccgccaccgacccggcgccgctggagatgttcgagaccactatcgagttcaagcccaaggaccaatggcgtcccggcatgaccccggacaaactggtcaaggaactggaccgcgtggtgcaggtgccgggcctgaccaatatctggatcccaccgatccgcaaccgtatcgacatgttggcgaccggggtcaagagcccgattggcgtgaaggtcgcgggcaccagcctgatgcagatcgatgcggtgacccaggccgtggagaaggtcgccaagactgtgccgggcgtgagttcggcgttggccgagcgcttgaccggcgggcgctacatcgacgtcgacatcgaccgtgccgccgctgcgcaatacgggctgaacatcagcgatgttcagtccatcgtgtcgggtgcggtgggcggtgaaaccattggcgaaaccgtggaaggcctggcgcgtttccccatcagcctgcgttacccgaaggaatggcgcgactcggtggaagcgctgcgcaacctgccggtgtacacgccacagggcagccagatcaccctgggcacggtggccaggatcaaggtcaacgatggcccgccgatgctcaagagtgaaaacgcgcggccttccggttgggtgtatatcgacgtgcgtgatcgtgacctggcttcggtggttcgggacctgcgtgcggcgatcaaccagcaggtaaagctgcaaccgggcatgagcctcagctattcggggcagttcgagttcctcgaacgcgccaatcagcgtctgaaactggtggtgccggccaccttgctgatcatctttgtgctgctgtacctgacctttcggcgggtgggggaggcgctgctgatccttgcgaccttgccgttcgcgttgaccggcggcgtgtggctgctttactggctgggcttcaacctgtcggtggccacgggcgtgggctttatcgcgctggcgggggtgtcggcggagttcggcgtgatcatgtggctgtacctgaagaacgcctgggccgagcgcaaggatggcaatctattggcggccatcaccgaaggtgcggtgctgcgggtacggcccaaggcgatgacggtggcggtgatcattgccgggttactgccgattttgctgggcagcggcaccggcagtgaggtgatgagccggattgctgcaccgatgattggcgggatgctgacggcgccgttgctatcgctgttcgtcattcccgcagcctactacctgatgcgccgccgataaacatgtgggagggggcttgcccccgatagcggcggatcagacacaaatccagtgactgacacacagctatcgggagcaagctccctcccacaagggatctccaacgccggcaggttcagtcgtcgaacccgacctgctcgtgaatctcatccaccttcaactccaaccggtacgccaccgcgataaacaacgcctggcacaggcacaaggtggcgctcaacgagcggaaggcaaacgacgagccttcattcaccaacagcactgcgttagcccgcttggccaggggcgacaggttgctgtcggtgatgatcagcgtcttggcctggtggtgctgggcgatgcgcaggcagtgctgggtctctttaccgtagggcgtgaagctgatggcgatcaccaggtcattggcgcgcacgctgcgcatctgctcgcggtagctgccgcccaggcccgagatcaggtggatgcgcttgttggtgtgctgcaggttgtagaccaggtagtcggccaccgcaaaggaacggcgcacgccgaccacgtagatattgtcggcgttgaccaccaggtccacggctttgtcgaaggcgacatcatccagctccaggcccaggcgctcgatgcccgacagcgtggcgttgacgcattcgcgcgccaggtcgccgccgctggctttctgcgacttgttggcgatcatgctgcggatgcgctgctggtagttctgcaccggcgtggtcttgtgggtgtaggcctcgcggaacagcgcctgcatctcactgaacccactgaacccgaaacgctgtgagaaacgcacgatggccgacgggtgcacttcgcattcgcgggcgatgtcgctgatgcggtcgaccatgatccggtcgctctgctggctcatgtagctggcgatgcgcttgagctggcgcggcaggctctcgtattcgtcggtgattagctgcaacaggcgctcggcattgatcggagggctggcgatagagtcttccagggtggtctcgggatcggtgcgggacatgggcaatccttctggcgttttcgtctgttgcgctgatgggtggcgcaagtctacagggtaggcgcaaaaaaataccccggcatcacggccggcgtggcctgctgaaacgatgcactgtggtgggagcgcccctgtacgagcttaatggaaaaaatattccaatgaaaaaatatctggaataaatattgattggcgccgccggacgttctagtctgctcccaccaagagcgtttgccgcccccacggcggcacaacgcaggctgataaaaataacaggagccagcatgggccagactcgttttgccagtgggcgtcaattggatctgatttgcctcgggcgcctgggcgtcgacctctatgcacagcaagtcggtgcgcggcttgaggacgtgtccagcttcgccaagtacctcggcgggtcctccgccaatatcgccttcggcaccgccaggctcgggctcaagtcggcgatgctgagccgggtcggcgacgaccacatgggccgtttcctggtggaatccctggcccgcgagggctgcgatgtcagcggcatcaaggtcgacccggaacgcctcaccgccctggtgctgctcggcctcaaggaccgcgaaaccttccccctggtgttctaccgcgaaaactgcgccgacatggccctgcgcgccgaggacatcaacgaagcctttatcgcgtccagcaaagccctgctgatcaccggcacgcatttctccaccgacggcgtgtacaaggccagcatccaggccctggattacgcggccaggcacaacgtcaagcgcgtgctggatatcgactatcgcccggtgctgtggggcctggcgggcaaggccgatggcgaaacccgttttgtcgccgaccagaatgtcagccagcacgtgcagaagatcctgccgcgcttcgacctgatcgtcggcaccgaagaagaattcctcatcgcgggcggcagtgaagacttgctcgctgccttgcgcaaggtgcgtgaactgaccccggcgaccctggtggtcaagctcggtccgcaaggctgcacggtgatccacggcgccatccccgcacgcttggaagacggcgccatctaccccggcgtgcgcgttgaagtccttaacgtgctgggggccggcgatgcgttcatgtcgggcttcctcagcggctggctcaacgatgccagtgatgagcgttgcagccagttggccaatgcctgcggtggcctggtggtctcgcgccacgcctgcgcaccggccatgccgacgccggcggagctggaatacctgttcaacagcccggtgccgatcacccgtccggaccaggacgtgaccctgcaacgcctgcaccgcgtgacggtgccgcgcaaaagctggaagcagctgttcgtgtttgccttcgaccatcgctggcaactggtggacctggcgcagaagggcggccaggacctggcgcgcatcagcgaggccaagcaactgtttatccaggccatcgaacgcgtcgagcaaaagctcgccgaacaaggcgtggaagccgatgtcggcctgctcgccgaccagcgcttcggccaggacgcactcaacgccgccagcggccgtggctggtgggtcgcgcgcccggtggaagtgcagaactcgcggccgctggtgttcgagcatggccgttcggtgggcagcaacctgatcgcctggccccaggaacagatcatcaagtgcctggtgcaattccacccggacgacgaaccgctgctgcgcctggaacaggaagcgcaattgaaagcggtgtacgaggcgtcgattgtcagcgggcatgaactgctgctggaagtcatcccgcccaaggaccacccgtccacgtatcccgacgtgctctatcgcagcctcaagcgcctgtacaacctgggcatctacccggcgtggtggaagattgaagcgcagtcagccgaggactggcagaagctcgacgccctgatccaggagcgcgatctgtactgccgaggcgtggtgctgctgggcctgaatgcctcggccgaatgcctcgccgatggcttccagcaggcccgcctgagcactacgtgccggggttttgcggtgggccgcacgatcttccaggaaccgagccgggcgtggatggccggcgagatcgacgatgaaaccctgatccaacgggtgcaagccacctttgaacagttgatcaacgcctggcgcagctcccgaggctaaacccaattcctgatttgaaatgcaatccaatgtgggagggggcttgcccccgattgcggttgttcagtgacagcagtggtgtctgacactcagctatcgggggcaagccccctcccacatacagcaaaaagcagatctcagtgatacctgaaaataataaaggtgcagccatgcccgcaatccgaattggcatcaacccgatctcctggagcaacgacgacctgccggccctgggcggtgaaacgcccctgagcaccgccctgagcgaaggcaaggaaatcggctacgaaggcttcgaactcaacggcaaattccccaaggacgccaagggcgtcggcgacgtattgcgcccgtacgacctggcgctggtctctggctggtattccagccgcctggcccgacgctcggtggcggaagaaatcgcggccatcgccggccatgtcgagttgctcaaacagaacggcgccaccgtactggtctatggcgaggtggccgattcgatccagggctcgcgcatccgcctgatcgaacgcccacgtttccacagcgaacaggcctggcaggactacgccgacaagctcaccgaactggcgcgcttcaccctgtcccagggcgtgcgcctggcgtatcaccaccacatgggcgcctatgtcgagtccccggaagacatcgaccagttgatgcagcgcaccggccccgaagtcggcctgctgttcgattcgggccattgctacatgggcggcggcgagcccatagaggtactgcgcaagcacatcgaccgcgtctgccatgtgcatttcaaggacgtgcgcaaaccggtggtgcaactggcgcgcaaccagatgtggagttttcccgactgcattgtcaacggcactttcaccgtgcccggcgatggcgatatcgacttcgccgaactgctcgatgtgctgctggccgcccactatgaaggttggctggtggtggaagccgagcaggacccggccgtggcgcccagctatctctatgcgaaaaaaggctacgacaccctgcgtgcgcttctgaatgagaggaccggacaatgagcctgttggtcaaaagcagcaaacgcggccagaccatggtcgccctggaacccgggcgcctggagtacgtggggttcgccgcctaccgcctgagcctgggcgaaaccctgccggtcagcgccggtgaccaggaactgtgcctggtgttgctcagcggccgcgtgaacatcgagggcgagggcttcaactggcagaacctgggcgatcgccagtcggtgtttgaagacaaatcaccgttcgccgcctacctgccgccgggcaccgatgcccaggtcaccgccctgagtgatgtgcagattgcggtctgcgccgcgcccggcgccgaaggctacgaaccgcggctgatccgcccggaaacctgcaagcgcagcgtgcgcggcaaaggtgccaacacccgctacgtgtgcgacatcctgcccgacagcgagccagcccattcgctgctggtggtggaggtgcgcacgccgtccgggcattcatcgagctacccgccgcacaaacacgacaccgatgacttgccgcgccagagcttcctcgaagagacctactaccaccagatcaatccgccccagggctttgtgttccagcgcgtctataccgacgaccgcagcatcgaccaggccatggccgtggaaaacagcgacctggtcgtcgtgcccaagggctatcacccggtcagcgtgccctatggctacgagtcctattacctgaacgtgatggccggccccaagcgcgcctggcatttccacaacgacccgcagcacagctggctgctggacctctaatcagcggttccggacggagaataacaacaatgaagtcgcctctacgtttcgcccttaaccgcatcgtcgcgcccaacctgtccctgccggatttcatccagctggcggcggcgctcaagtgcgatgccatcgagttgcgcaatgacctggcggacaagcagatcgagttcggcaccccggccagccgcgtgcgcgagttgtgcgcggtgcagggcatcacggtgctgtcgatcaacgcgctgtacccctttgacgtgtggaacgacgagcgtcgtgcccaggcaatcaagctggcgacctacgcccgcgagtgcggcgcccagggcctggtgatgtgcccgctcaacgagccgggcgacacgcgcaacgaggcccagcgtgcggccggcttgcgcacggccttgagcgagctggcgccgatcctgcgcgagtacggcatcctcgggtttatcgaacccctgggctttgaagagtgtgcgctgcggcgcaagcgtgtggcggtggacgcgatcaagtccatcggcggcctggatgtgttccgcctggtgcacgacaccttccatcatcacctggccagcgagcatgagttcttcccggagttgaccggactggtgcatatctccggcgtcgaagataccgaggcgccgctgagttcgattcgcgacggccaccgtgttctggttggcgagggcgacatcctcggcaacgcggcgcagatcgacaccttgctcagcaccggctacagcggctacctgtcgttcgagccgtttgccgagagcgtgcacgggctggcggatatccagcaggccttgggcgcaagcatcgcccacctgcagaaacgataaggggcgcgacatgaccacaacccgactgaccatggcccaggccctggtgaagttcctggacaaccaatacatcgaagtcgatggcgtgcagagcaagttcgtcaccggggtgttcaccattttcggccacggcaacgtgctgggcctgggccaggccctggagcaggacagcggcgacctggtggtgcaccagggccgcaacgagcagggcatggcccatgcggcgatcgggttcgccaagcagcacctgcgccgcaagatctacgcgtgcaccgcctccgtaggcccgggggcggccaatatgctcaccgccgccgcgaccgccacggccaaccgtattccgttgctgttgttgcccggcgatgtctacgccagtcgccaacccgacccggtgttgcaacagatcgaacagttccacgacctgagcatcagcaccaacgatgcctttcgctccgtgagcaaatactgggaccgtatcaaccgccccgagcagttgatgagcgccgcgatccacgccatgcgcgtgctcaccgacccggctgaaaccggcgcggtgaccctggcattgccccaggacgtgcaggccgaggcctgggattatccggattacttcctgcaaaaacgtgtgcaccgtatcgaacggcgcccggccacccgcgcgatgatcggtgatgcagtggccgccttccggggcaagcgcaagccgctgatcatctgcggtggcggggtgaagtactcaggcgcgaatgccgcgctgcaagcctttgccgagcgctttgatattcctttcgccgaaacccaggcgggcaagagcgccgtggtctccagccatccgctgaacgtgggcggtattggcgaaaccggttgcctggcggccaacctgctggcgcccgaggccgacctgatcattggggtgggcacgcgttacaccgatttcaccacctcgtccaaatcgctgttcaagcacccggaggtgacgttccttaacctcaacatcagcccctgcgatgccttgaagcttgacggcgtgcaagtgctggctgacgcgcaggtagccctcgaagcattggcggatgccctcggcgattatcgctctggctggggtgggcaggtcgtcgaggccaaggcgcagttggacgccgaagtggaccgtgtgcaccaggtggaatacgacggcgacgcctttgtgcccgaggtcgacgaccgccttgaccgtggcgtgctgcgtgaattcatcgagctgaccggctcgtgcctgactcagagctgcgtactgggcgtgctcaaccagaccctggccgacgacgcgatcatcgtcgccgccgcgggcagcctgcccggcgacctgcaacgcgcctggcgcagcaagggtgtcaacacctaccacgtcgaatacggctattcgtgcatgggttacgagatcaacgcggcgctcggcgtgaaactcgccgagccgactaaagaggtgtacgccctggtcggcgatggctcctacatgatgctgcactcggagctggccacctcgatccaggagcggcgcaagatcaacgtggtgctgctcgacaacatggcgttcggctgcatcaacaacctgcagatcggcaatggcatggacagcttcggcactgaattccgctaccgcaaccctgagagcggcaagctcgacggtggcctggtgccggtggacttcgctatgagtgcggcggcctatggttgcaagacctacaaagtcagcacggtggagcaactcgaagcggcgctggcggatgcgcgcacgcaaacggtgtcgacgctgatcgatatcaaggtgctgcccaagaccatggtccacggctacctgtcgtggtggcgggtaggggtggcgcaagtgtccaccagcgaacgcacgaatgccgccgcgaaaaaactcaatgaacacctggcgaaggcccggcagtactaataacaagaggagtgtttgtatgtctttgaagctaggtgtcatcggtacaggcgctatcggccgggaccatatccgtcgttgcagccagaccttgctcaacagccaggtggtggcggtgactgacatcaacctggagcaggccgccaaggtcgtcgccgatttgaagctggacgctgaggtgtacgccgacggccatgcgttgatcaactcgccgcaggtcgaggccgtgctggtgacgtcctggggcccgagccacgaagaattcgtgctcgccgccatcgccgccggcaaaccggtgttctgcgaaaaacccctggcggtcaccgccgagggctgccgcaagattgttgacgccgaggtagcttacggcaagcgcctggtgcaggtcggcttcatgcggccgtatgacgaaggctatcgcgcactcaaggctgtgatcgacagcggccagatcggcgagccgctgatgctgcactgcgcgcaccgtaacccgacggtggtcgaaaactacaagaccgacatggcgatcaccgacaccctgatccacgagctggatgtgttgcgttggctgctcaacgatgactacgtgtcggtgcaggtggtgttcccgcgcaaatccagcaaggccctggcccacctgcgtgacccgcagatcgtgctgctggaaaccgccaagggcacgcgcatcgatgtggaagtgtttgtgaactgccagtacggctatgacatccagtgcgaagtggtgggtgagaccggtatcgccaagctgccggagccttcccaggtgcagatgcgcagtggcgcgaagctgtccaacgcgatcctgatggactggaaggatcggtttatcggcgcgtatgacgtggagttgcaggcgttcatcgacagcgtgcgcgccggacaggtgggtgggccgtcggcgtgggatggctttgcggcggcggtggcggcggatgcgtgtattgaagcgcagggcagtgagcagattgtgaaggtgagcttgccggatcgcccacgtttctacggctgaatcactgaagaaatgctgtgaaaaatgtgggagggggcttgcccccgatggcggtggatcagatagatattcattgactgacacactgtaatcgggggcaagccccctcccacagttgaatcgggttttcacttcaagcaaggagtgtaggtatgcgaatcggactagtcggctacggccatggagggcgcttctttcatgcgccgctgattgccacattggccggtgccacatttgtcggcgtggtcaccaggtctgcggaacgccgccagcaactggcaaccgaccacccaggcctcaaggccttcgactccatcggccagatcgtcgaagccggcgtcgatgccctggtcatctccaccaccctcaagggccgccccgcgctggtgcttgaggccatcgaacacggcgtagccgtggtcagcgacaaacccttcgccgccaacgccgaacaggcccaggccttgatcaccgccgctgaacgccagggctcgttgctcagcgtctaccagaaccggcgctgggactcggactacctgaccctgcgcaaactgatcgacgctggcgccctgggcacaatcacccgtttcgaatcccgcgtggaacgctacagcccgcaagccgtgggcaacgccagcggtggcggctggttgcgcgacctgggcagccacctgatcgatcaggccctgcaactgttcggcccggttgaccgggtgttcgcccaactgcactacaccgccgaacaccctacggtggaccatggcttctttgtctccctgacccatgccaacggcgtcatctcgcacctgtggggcaatgccctgcaaaacagccaggcgccacgctttcgtgtgagcggcacctccgggtgctacaccgttgaaggcctggacggccaggaagaggccttgatggccggcaagtcgccgaaaaccgaaggcgagcactggggggcggaagaacaccgacgctggggctggttcgaacaaggcccggaacgcgagcgggtgccgtcggagaagggctgctggacgcagttctatcggcagttgcaagtggctgtgcaagggcagggaccgctgccggtggacgcctatgatgcactggaaaccacccgtatattggacgccgcacgcctgagcgccgagcgccagcaggtggtttcaacaaaaatagaataaaattctaaaacaggttgatatggaaattattttccaataaagtcttttccaggttgcataaagtacgttcggactcgatccgcacgactcaacaaaaacaagatcaaaaacaaccaggtaccgtcagatgaaaatcttcaacgctgtactgcgagttttacaccctgcccacacgccacgcgatctgccccgcgcccggccgttttacttctccttccttaatgtgctgtgcgtcgaaaaccaaggcgcgctggtctgctgcattcccggcgcaccggtcgtgcggctgcctgccgagctctgataaacgcaacgtccaaaaaaccaacaagaaagtggagacagaccgttcatgaagaccccgatccgttttaccgcgctggccttgtccatgctgctcgccagcggtgttgccgcggctgccgatctgaagataggcgtgagtatgtccgccttcgatgacaccttcctcacctacctgcgcgaagacatggacaagcaagccaagtcctaccccaagggtgacggcgtgcagttgcagttcgaagatgcgcgtgccgacgtggtcaagcagttgagccaggtcgagaactttatcagccagaaagtcgacgcgatcatcgtcaacccggtggataccgcctcgaccgccaacatcatcaaggccgccaccgcagcgaaaatcccgctggtgttcgtcaaccgccgtcctgacagcccgaccctggcgccgggcgtcgcggcggtgacctccgacgacgtcgaggccggcaagttgcagatgcagtacatcgcagaaaaactcggcggcaagggcaacatcgtgatcctgctgggcgacctggcgaacaactccaccaccaaccgcaccaagggggtgaaggaagtcctgagcaagtacccaggcatcaagatcgagcaggaacagaccgggatctggctgcgtgacaagggcatgaccctggtcaacgactggctgacccagggccgtgaattcaacgcggtgttggccaacaacgatgaaatggccatcggcgcgtccatggcgctgaagtctgcgggcaagaagggcgtgttgatcgccggtgtcgacggcacgccagacggcttgaacgcgatcaccaagggtgacatgaccgtgtcggccttccaggatgccaagggccaggcggacaagtcggtagagaccgcgcgcaagatggccaagaacgagcccatcgagcagaacgtggtgatcccgttccagctgatcaccccggacaacgtcaaagacttcaagtagtccctacataacaacaataagccggcagggcggtcgtgcccgccttgccgatggagtacctccctatgctcgctcaagccgctgtctcgcagcctcccggtatccagccgctgccgctggacgaaccctacctgctggaaatcgtcaacatcagcaaaggctttcccggcgtcgtggccctggccgacgtgcagttgcgcgttcgccctggcacggtgctggcgctgatgggcgagaacggtgcgggcaagtcgacgctgatgaagatcatcgccggcatctaccagcctgacgccggcgagattcgcctgcgtggcaagccgattgtgtttgaaacccccctggcggcccagaaggccgggatcgcgatgatccaccaggaactcaacctgatgccgcacatgagcatcgccgagaacatctggatcggccgcgagcagctcaacagcctgcacatggtcaaccaccgcgaaatgcatcgttgcaccgccgagttgctggcgcgcctgcgtatcaacctggaccccgaggaacacgtgggtaacctgagcatcgccgaacggcagatggtcgaaattgccaaggccgtgtcctacgactccgacatcctgatcatggatgaaccgacctcggccattaccgagaaggaagtggcccatctgttttcgatcattgccgacctcaagtcccagggcaaaggcatcgtctacatcacgcacaaaatgaacgaagtgttcgccatcgccgatgaagtggcggtgttccgcgacggccagtacatcggcctgcagcgcgccgacagcatgaacagcgacagcctgatctcgatgatggtcggccgtgagctgagtcagctgttcccggtgcgcgagacgcccatcggcgatctgctgctgtcggtgcgcgacctgagcctggacggcgtgttcaaggacgtgtccttcgacctgcatgccggcgagatcctcggcatcgccggattgatgggctcgggccgcaccaacgtggccgaaaccattttcggcatcacccccagcagcagtggccagatcaccctggatggcaaggcggtacgcattaccgacccgcacatggccatcgagaaaggcttcgccctgttgaccgaggaccgcaagctcagtggcctgttcccgtgcctgtcggtgctggaaaacatggagatggcggtactgccgcactacaccggcaacggctttatccagcagaaagccctgcgggcgctgtgcgaagacatgtgcaagaagctgcgggtgaaaaccccctcccttgagcagtgcatcgataccttgtccggcggcaaccagcagaaggccttgctcgcacgctggctgatgaccaacccgcgcctgctgatcctcgatgaaccgacccggggcatcgacgtgggtgccaaggccgagatctaccgcctgatctcgttcctggccagtgaaggcatggcggtgatcatgatttcctccgagttgcctgaagtgctgggcatgagcgaccgggtcatggtgatgcacgagggcgaattgatgggcaccctggaccgcagcgatgcaacccaggaaaaagtcatgcagttggcctccgggatgaccgcagtccactgatgtacagaataaaaaggtgatgggctatgaacgcaataacggataacaaacctgcgacggtgccaaccaaaagtcgccgacgcatgcccaccgagctgagcatcttcctggtgctgatcggcattggcctggtgtttgaattgttcggctggatcgtgcgcgaccagagcttcctgatgaactcccagcgcctggtgctgatgatcctgcaagtgtcgatcatcggcttgctggcaatcggtgtgacccaggtgatcattaccacggggatcgacctgtcttcaggctcggtgctggcgctgtcggcgatgattgccgccagtttggcgcagacttccgacttttcccgggcggtgttccccagcctgaccgacttgccggtatggattccggtggcgatggggctgggtgtggggctgttggcgggggcgatcaacggcagcatcattgctgtcaccggcattccgccgttcattgccaccctgggcatgatggtttcggcccgtggcctggcgcgttactacaccgaaggccagccggtgagcatgctctcggactcgtacacggccatcggccatggcgcgatgccggtgatcatcttcctggtggtggcggtgatcttccacatcgccctgcgctacaccaagtacggcaagtacacctacgccatcggcggcaacatgcaggcagcgcgcacctcggggatcaatgtcaagcgccacctgatcattgtctacagcatcgccggtttgctcgcaggcctggccggcgtagtggcgtcggcacgtgccgcgaccgggcaggcgggcatgggcatgtcctatgaactggatgcgattgccgctgcggtcatcggcggtaccagcctggcgggcggggtagggcgcattaccggcacagtgatcggcgcgctgatcctcggggtgatggccagcgggtttacctttgtcggggtggatgcgtatatccaggacatcatcaagggcctgatcattgtggtagccgtggtcatcgaccaataccgcaacaagcgtaagctcaagcgctgattcaataccctgtcgaacacgggataaaatgtgggagcgggcttgctcgcgaaagcggtgtatcagtcaaagatgtgttgactggcagacggcattcgcgagcaagcccgctcccacatggggtctatcgctgacctgtgctaaccgtttgtcttctatatagctccacaacactgaatttcttgctataaacgcactccgataaccattcgccaagcccgtcctggtgccttttggggttatccgggaaaaaatgcctgtcatttcagttgctgcgccctcaagtcggccttagactgccgcccctcgtaaattgagtgccgggtggcgcttgaaatggacggcgcctttccgagacctgcagaggccttccggaacgctcccttattcgccttaatgcacgtattttttatagagaaatcaatgacaaaggaaaagttgctggccatgccggcggatgactacatgaatgccgaacagcacgcttttttcgagaagttgctgcaagacatgaaagtggaacaccacgagcgcattgaacagaaccgtatcgccattgaaagcctggataccccggccgacccggccgacgccgcttccgtggaagaagagcgtacctggctggtcaacgccatcgaccgcgaccagcgcatgctgccgcagcttgagcgcgcgttggagcgcatcaaggaagattcctttggctggtgtgatgacagcggtgagcctatcggcctcaagcgcctgctgatcagccccaccaccaagtactgcatcgaagcgcaagagcgccacgagcagatcgacaagcaccagcgccaagcctgatgcggtgaagctgggggaccgccacgcggttccccagggcaagacccgttacgccctgtctattgatctgctgcaagctaccccactaaaggcccatggataatggcccgatagtggcgtttaatgcagcgacaataatgacaagcagtggggtaacgaagatggctggagacggatctctgatgggcgcagctgtgtcaccgcaaccggtggtacgcgggctgcccggctggctcacgccgttgttgcagagcaccgccctggtgctggtactgctgggcctcgtgtttgccaacttgccgctctacctttgcctgccactggccgtgctggtgatctggctgcctcgcctgaaaaatcgtacgccggttattgcgccttccgacaccgccgatgccattggcgagttgacccgcgacctgtcctataccaccagccataacgcactctccgccgccggcgtggcctattcggtcaagcaactggcggcgcgcctgcagtcgcagttgagtgcggccaagcagatcgtcagcagtgccgaagtgatgatcggcactgagaaggtgacgtcccagctcagccgtgaggcattgagcgccgcgagccaggcccatcagcgcagcaccgaaggccgtgaagtgctggcccagtcgatcagccgcatgcaccagctcagccagcgtgcgaatgccagccgtgagctgatcgaagccttgagccagcgcagcgaggaaatccagcgcgtgaccctggtgatccagtccatcgccagccagaccaacctgctggcgctgaacgcggcgattgaggcggcgcgggccggtgaacatggtcgcgggtttgccgtggtggcggacgaagtgcgcgggctggccgggcgtaccgccacggccaccgatgaagtcggtgtgatggtggccgacatccagcaacgcactgcccaggtggtggagcagattcgccagctctcggcggacctgcacaccggtgtcgagcaggtagagcacgctggcgagcagctgcaaaatatcgccagcctggcggcggatgtggaaggccaggtcaatgaaattgcccagggcaccgacaccaaccgcacccagctcgatagcctgttccatgccgtggagcagatgcgcagcgacctcgccgtcagcgatcagcaaacccgccaactggccgacgcggctgtacaaatggaaggccaggccgaaaccatcagcgagcgtctggcggaagtcgggctggatgactaccaccagcgcatctatgacctggctcgcgaaggcgccagccgcattgccgcgcaattcgaggccgatgtgcagcagaaccgcatcagcctggatgacctgttcgaccgcagctacacgccgattgccaacaccagtccgagcaaataccacacccgcttcgacggttacaccgaccaggtgttgccggcgatccaggaggcgctgttgccgcgtcacgaagggttggtgttcgccattgcctgcacgccccagggctatgtgccgacgcacaacaaggcgttttcccaggcgctgaccggtgatgcgcaggtggacgctgtgcagaaccgcaccaagcgcaagttcgatgaccgtaccgggattcgctgcggcagccatcagcaggcggtgttgttgcaaacctatacccgcgacaccggtgagctgatgcacgatctgtcggtgccgatcatggtcaagggccggcattggggcggtttgcgcctgggttacaagcccgaggccgcgaaaggcgggcgttaggattattgcggtttatgcaagggagctattccggggatagctttttccaacagcaggaaaaccgtagcatggcgaacattgttagccagctaactaatgctgcggagaagttccatgcaaaacaaagtcgatgtcgccgtgatgattggcagtggtgtaccgcaagccttgcgggcattgggtcaaaaggcctgttgggtggtattgctcaatggagagcagcgcggtacggcgttcgccagtcgcgatgaggcggaggagtgcagggctgcctggcaggcgctgttgcggctggagcagtcagacagcctgcattgacggctgcttagtgcggttgatgcaggcgttggttcagctcatccaccgcaatcgcccattcggcgtcgtcacgcagttcttccttgagaaagctggcctgttgtgcggaccagaacggcgcatcgatcagtttcacatcttcgggcagcggatgggcgacgataaatgcgtcgatggcctccggggttgaatccaggcctaattgttcaaacagggtttcaagggtggggattggcgcgtccatttcgttctccatgcagggtggtcgttatgcatgggagggttgtagcgcagcggagttctatcgaatgttcaggaattcagggccccggcatccacagcagtctttaacgccttggcggcctcttttgcagcgacggcggctgcatcgacagttttgaaccagcggtctttttccacttggtgcgtggtcacagtggtcagcggtggcttggcccgcatcacgatcactgcttgaaactcaccatctacttcccttgcgtcgccatggatgaaaaattcgccgatatcaaattccgtcacgtagagccttcccttggagataactgcactggagaaacctggcccgtggggcgcaaacttcagtggacgggccagtatggcagttgttgcgggtcggcggcgcagtaaagttaccgggcggacgaaacgattgctccgtggggggcgtgcaacatggcttccagttttctggccagttcacaggccttgacatggtcgctgcgaaagcctttgatgcggccgctgagcacttcgcgcacgtggaagaagttccggccggcaggtacgacttggtaaagaaccgaatccgggtacccctcgaagctgttcaagcggtagtattgagcctcgtcctgacaggatgaacgggtttgcgaagacatagcgctgtagggtgatcgttgcatggcctgctccttttcgatctggcgggatgactggattgcagcgttttgactggttttgatcggtgctgctgttttagtattgtcgtcagcagtcagcgtccggttccatgacagcgtattcatttgtgtatgcatgtcggaaaactgcatttttaatcgggttattctctgaagttggtcgacccgtattctcgggccgttgaacctgtgatctcctgtggcgcctgatgaccttgcacaaggcccatcgagcatgtctgtactagtctttcggctcgacagcaggattttcttcagttttttcaaagaatgagttgtgtgatcgtgccgtgatggccgtttttttgtgctgcccgctctggcggacagcgctctttccatgtgggggcgtttccttggcagtcagtaatctggatatgcacgcgttattcgtgctgggtgatttgcgcgcaaagttggtcaaacagttccaatcccgttttgtttatattaccgagcagacgccggaaggcatctacattgccgaaatcgataccgaggcggcgatggtggtggatgacaaaccgcgccttgagctcaaggtcggcgaccatttccgggcggcggtattgcccagtcgtgagggcggcaagttcgaattgaagttccgcgatatcaagttgacggtctatggcctgggcgactacgcctttgtgtcctcggccgaaggccagggcatcgtgttcaaggaaggccacagcgtgatgctggtgttcgccgccaacgagcaactgcaggaaggcctgaccaaaaccctgaaggccgtgaccggcaaggccgccaaatggcgcaaaggcgaactggtcaccttcaaggccagtgaataatcagcaaaaaccgcgaacacccgttatctcccggaacctctactacagttgagttgacttaactattcagaggcttcgcgcatacgtagcaaagccgtccgccattggctgcgatatcgcgaggtgcgaaggcatgaaaggattgagaacgctgttggctgcgtcgctgacgagcctggggctgtctatggccacgttgccagtgaacgccgccgaggcgccgatacattttgccgacctgaactgggaaagcggcagcctgatcaccgaagtgctgcgggtgattgtcgagaagggctacgacctgcccaccgataccttgcccggcaccaccatcaccctggaaaccgccctggcaaagaacgacatccaggtgatcggtgaagagtgggccggccgcagcccggtgtgggtcaaggccgaggccgaaggcaaagtggtgggcctgggtgacacggtcaaaggcgcgaccgaaggctggtgggtgccggaatacgtggtcaagggtgaccccgccaaaggtatcaagcccctggcgccggacctcaagagtgtgaaggacctggcgcgctacaaggacgtgttcaaggacccggaatcccccggcaaggggcgctttctcaacagccccatcggctggacctcggaagtggtcaacaaacagaagctcaaggcctacggcctggatgacagctacgtgaatttccgcagtggttcgggcgcggcactggatgccgagatcgcctcgtcgatccgccgcggcaagccggtgctgttctattactggtcgccgacgccgctgatggggcgttacaagttgatccagctggaagagccgccgtttgatgccgaggcatggaagaccctgaccgatgcggataaccctgatccgaagccgacccggtcgttggcgtcgaagttgagtatcggggtatcgacgccgttccagaaagatcatccgcagattgcgcagttcttcgagaaagtcgagtttccgattgagccgttgaacaaggcgctggcgactatgagcgaaaaccacacggcaccacgggaggtggcccaggcgtttcttaaggagcatcccgaagtgtggaaggcttggttgactgaggatgtggcgcagaaggttgaggcgagcctgaaataaccacggatctttcagttcaatgcaaatcaagggtgggagggagcttgctcccgattgcagcgtatcagtcacggcatggtcgactgattcaccgctatcgggagcaagccccctcccacatttagttgcattccaggatcagaaccgggtctgtaccgccaactcaaaggttcgtggtgagcccaagtaatacgccggcgacacatgggcaaactcggcatacacctcattcgtcaagttgcgcacacggcccgtcaccgaggtgtgtgagtccaccttatagcgcaggaacgttccgaacagcgtgtaggccggcactgtctgggtgttggcgttgtccgcatacacctcggctacatatcgggcgtccacgcccccttgccaatcctcggcaaaatcataggtcagccacagattccccacgcgcttgggtacgttggttggcgtgttgcccttgcgcgacaccactgcgccactggcgattttctcgttgaagtcatcgtattcggcgtccacccaggcgaaattgccttccgccagcaactttggcgtgatgcgcagcgagctggccaattcgatccccttggatgactgtgcgccgaccggaatgctgttggtgggatcctgcgggtcggtgacggcaaagtccttgcgctcgatcttatacgcggcaacggtggccgaaccacggccgtccaggtaatcgaatttgctgcccacttcccactgcttgcccgtcgagacatcaaacacttgcgtggtggtatttggctgctcggcggctgtgctgtattgcacatacacattggccgtcgggatgaactggtaggtcaggcccacgcgtccggtcaccggctcccagctgcgtttgaagtggcgggggttggtggcggttattgcgcgatgattggtgacgtccaggtcgatggcgtcataacgcaggccggtcaacagcgacaatttgtcggtaagacccaggcgattctccacgaacaatgccttggtggtgacagcgttggtcttgtccttgccgaagctttcccgggtccgcgggaggtcaaagaagtgtccggggtcaaagttgttggggtctaccgtgctgttgccgggtacgttccacggtgtattggtggtgctgttgaccttgtactcgaagccgccggaccaggtagttgacaggccgaagaggctatcgtcgtggcgcagctcgaactggttgccgttctgttcaccttgatggcgcacctgataggccgtcgaacggtttaccgccgtgttgttcgcgttgtactgataggtttcaaggttgcggtaatcgcgttggctgtccaagtggtaaagggtgtttttcagggtggtgctgtcgttgaggcggtagtcgatgatcgaacgcgcccagagggtgcgctgttcgtagcgcccgtcggcgacgttgtagttgttgaaacggttgtgtttgtcgatcttcaactcgcccgccttggggttgagcaccggcgtgccccagtaggggctgtcttcatgctcatcctgatattccagcgccagggtgtgggacaggttgggcgtgaggtcgctgagcaaggaaaacgccaggctccaggcgtcgcgctgatcgcggtcgatgtagctgtggttggtgttgcggctcacatccaggcgggcgtaatgctgcacctcggcgccaggttcggtcagggcatggttgacgccgaaggccatgccggcggtgtcgtagctgccgtaggtgagctggccttcggcggcttgttcctcgcgggtggccagcttggtcacgtagttgagcgagccgcccacggagcctgcgccgttgatcagcgaggaggggccacccaccagctccacccggtcatagatccatgcatccacggggcgggccagaccagtggcgacattgatgccgttgaacatctgggtgatctggctgctggtaaaaccgcgataggagacaaacccgccaaaccccggcggggcgctggcgttgacgccgggcaaggtgttggcggcatcgcgaaaggttttggcgccatggcgctcgatgtcattgcgattggcgatggccaccgacgccggggtttcccgcacactcaagcccaaccgcgacgctacgccgctggattgatccagggccaggccgggttcggcggcttgttcgccatcgatggtggtcggggccaactcaagggcccaggcgcagacaggcaggcagccgaacaggcctgccaacaggggtagatgtttcatggttgaatcctgaaaagcttgcttgaaaacaacgcacaggcgcccgtacttccttgcggaaacggtgctcagtgcagatcggaaagcgaaggcatcaggtgaaggcaggcggcgcgcgcggattagccgcaggccaggtgaagcgggcagggatgtcggcagccaggacaatggcaggcggtggtgcttggggctgtggcaacaccgccacattcaggctggaactcagcgccgggcccatgccgccggtggaacacagcgggcaaccaaacgccttggacagcgtcggtaaattctcttcagtggaattcgacggcttgggcgcctgggtacgcgggtccaccgtacagaactggccgccgatgccattgagctgcatcccgaccatctgcccatgcccgatactgcaggcgaacacattgaacaggacgcagcagtagagcatccaggcaatgagcgagcggtcggcacgggcaagtttcatggggcggcactttaccatcagccgccgacgaaatgcctgcaaaaaatctcagggcgactatcctgtttcgcaccttttcagggagagccagccatgagctttgttgtcgcacgatggattgtcggggtttttacctgcatcagcatggtccacctgtactgggccgccggcggcaaactcggcttccaggccgccattccccaactgcccggcgaattcgccaacgggcccagacctgcattcaaaccctcggcattgggcacgttcctggtggcgatggggttggtggccattgcgctgttggtgtgcctgcgcgccgggctctacttctcggcggtgtcccacggggcgttgcagtggggcatcagcgcgattgccgtactgatgtttgcccgggcaattggggattcggagctggtggggttcttcaagaaggtcggtgggtcgaggtttgcgcggtgggatacgtatttttattcgccgttgtgtctggtgttgggggtggggttgttggtggtggcgtgggggtgaaaggggactaatgcagggtttgtaaaattctagaagaagaaaaacaggcctgttctgtttttgatcgcaagggtgtttaaagcaattattttgctcatagtagatgagttttcgtgcgtcaaatggttgttgaggatctctaaggttttggtgagctcctcaacgttgtaaatggcttcgtcttcgtaatcgtcgatgatttttccaagcgtggtgtttatcgcttcaagcacgccggactcaataagttgtccgtactcttcgcgggtaaggataacgctttcgagtaaagattctgggcattcgtctacgtctaataaactcatggcctctaaggtgagtggggtgcagattactttcattttttgtgtgcctttttattaaagtgtgtcgcttcattgtattcgctttgcgttctaccgatttgctttcctgagggagatatcctgttgttaggaaccacgccctcaaggctcaagtagcgccttttacccggctgtgatgggtcatggattctgaagtagtccccgttgaggtcttctacaatttcaatcccattttcagggttcttgtagatcttcttgcctttgtctgtcgtcgtcacgattgggtgagtgccggtaaacttgacaatgttttcatctaagcttgctacctcccactttgaggagtacttggctgcgcgctcagctcccccagttttaggaagttcagcttcccctgggtgcacttgtgctgacttaaccggatccttagcacttacctcttccctgcacccgttatctccagggcagttattcaaccccaacggatcaatccatcccgttgggtttggcacgtacaggtacacgttgatcccacccgccaacttcaccgggtccggcgtcaggtagcgaccaacatccggattgtagtagcgatggcggttgtagtgcagcccactttccggatcgaagtattggccctggaaacgcagtgggttgtcgacttttcctatatcgaggcgggttatttcgccgtaggcgcggtaatgcgcggaccagacgatttcgccgtcttgggcagtgagttcctgcggggtgccgaggtggtcaagttggtagtggtaggccttggtttcctttggaccgaaaccttccaacagcgccagcgggcgaaagctgtccggttcgtagaggtagctgcggtgccgatccgcgtggtgttcggcgatgagtttgtcgccttgccagaagaattcggtcgtaatcccatctacggttttactgatacgccgcccaaacgggtcgtagcggtagctggcgatctggccgtcaggtcgggtaatgccgatcagacgatgctggcagtcgtagcggtattcggtgacgagtgcgtggcccttgccactccgttcgcgaatcaggttgccgaaggcgtcatagtcgtagtggtggtcgccctggatcatcaggcggttgccggcgacgatgtcggggccggggcggttgtgcatcagcaggttgctggcggggtcgtggccgaagcgttcttgctcgccttgggtgtggtcggcgcgggtgaggcggttgagtgggtcgtagtggtagcggtgttcgcccttgcgggtgtcgagcaggcgggtgaggtttccggatttgtcgtagtcgtagtggcggcggtatagcgggccttcggcatcaacgatgctctggttgaacaggcggccctggtggtcatgttggtagtggctgaacagttggccttgttggcgttgctgttcgcgaccggccttgaacaggtgtgaggtgagtaccgcgccgttcagttcgacggtggcgaggtggccgcctttgtcgtgattgaaggtgaggcggttgttgtccggcaggcgcaggttttgcagctggccgcaggcgtcgtaggcgtagcgcagggtgccccagccttggtgttcggcggtgaggcggttttggctgtcgtactcgtaggccagggcccagtggccgtcttcgacacttaggagattgccctggcggtcgtaggcgtaatcgacggtattgccatcgggtagggtttttctgatgaggcgtccggcatggtcgcgctcgtagcgggtaaccagctgactgccgtcatcgccgtgttcggtcttttcccgaaggttgccgttgaggtcgtacacgtacgccgtgcgctgaccgtcaaacccggtttcctgctggatcaggccgttgctgtggtactggagccggtaggtctcgccaacctcgttttcgatctcggtcagcaacaagcgcgcattgtcgtatcggtagttgacctgggtgccatcggcattgatgcgacgactgatcaggtgcaggccgtcggcgtattcgtagcgggtgatgtgcccgagttcatcgcgctcggcggtgatttttccgtaggggttgtagctgtattccttgaacccgtcgcctggcagcacaacgcgaatcaaccgacctacgttgtcccactgatactgggtcagcgcgccgtgttcatcttcccgtgcaatctgtcgccccagatcgtcatagcgataacgcttgatcccaccattgggcaactgctcctcaagcaactgcccacgctcattccacaccagccgctgacagctgtggtccgggtaccaaaccccaaccagttgcccatatttgttgtagctgtagtcagtcacatgaccgtcaggatcgatcttgcgcgttacatcgccctgaccgttgcgctcatacttccaaaccgcctgaccccgccttacaacgcgtacgaagccgttgtcatgctcgtaggtcgtcggctcatcgtcccccggaaacaccgccaccaagcgcccggcttcgtcgtactgatacgccgtgatcgccccgagcgggtcctgctcaaccgtcagccggcctctgtcatcgtaggatttgaagtgctcggcgccatccggatccactcgctgcaccagccgcgcccgctggtcatgcacgtagacttcctggctgccatcggcgttaaacaccgtgacctggccgttgtcatcccaggcataacgcgtgtccatctgcgagaaactggcccaatgccgaatgcaccgcgccgccttgccagcccgttcccattcccagaagaaactcgccccaccggccaagccgcgctcaagaatgacgtgctgttcgtcgtagcgataaacctcgctttcaccgacggcattggtcgctgaaaccagtcgtcccaagtcgtcatatgcgtaggaaacaaccgtctgctccgtcacccacacaaacggaccgtcatccacaacgcgatgaatctggtaatccaccgccacaatccggcccgacacatagcgcaaacacaacgaacgcccgacaccgttatccacccgctcaatgcgccccagaaaatcccgagaaatacgcagccggttgtcatacgcatcgctgatcgctgtcagcacaccgtcgcggaagtggtagaaacgtgacgcctgcgccagcaccagttcatcgggcgcagcacccaaatagatcgccgcttcggccaggctattggtgatcgcaggtcgagaggcagtaggcaagggcagggtggtcgaccgattctcatgatcggtccaaaccaccgaatcaccctcaaccaccagccgatgcgccagcgagtgactccagccaaaccccagcccgcaatccatttccaccgcactggtgcggtacaagcgagtccactcaaccggcaagaccccgtccagcgtgccatcggtaagggtcagcaactcctcgccggtgaccatcgacaccgggcagccgttggtggcggtcttgtccgaagatgccgccgcatccccattgggattgcgagcagaagccggcacatcatccacatgctcttgctgcttcagcaccgcgttctgccgcgccttccagcgcatctgcatcgtgccttgcttgagcccgccgaccaccccgcgaaccgccaccgccttgtagcgatccaccgcctgcatgaacttggtcagaatcgccaacaggcccttaacaaaacccaccgccgcctcaacaatccgcgctccatacttgaccaaccgcaagctcaaatacgccacacccgccgccggcaaggcgatggtcaatacggcgccaatcaccaggtcaatcagcagcgacaccacaaaccctgctgctacctcggccatctcaccgggcggtaatgcgtccagccagagcatcgccgtacgtaccatcaggtacagcgctgcctcgtcactggcgagcaacatcgcctgttccatgaccttcggcgtgtcggtggcgatttgcgccaacctggcggcctgctcacccaactgctcaacgaacgccaacgggtcttcaagaattgcctgcaccagcttgatgctgtcccacacgtcgcgaatcgccgcccaactgcccgccaataaaccgctgccaattgcactggcggtcgagcgctcccaatgcggtttaaagccagaccactgctcccgaagccactgctccaaatccctggtcaacccggcgtaagaggcaaataacgcgtcaacctgttcctcggacacgccaccctgcacccgcacctgatagcgcccgcccgccgcacagtggtgcgagcccttgccctgttcatccagcatgaccaccgtggaactgccgtcatccaggccgatgacctccactgggatattgccgattggcacgtcatacaccgactcgaacttgctctcgatcttcaactcaccgcccatcgcgcagcgggtcacgctcgaaaagtcagcgtcggaaacgcttaccgaacgctgcgaatcccccacccgcaacacccgatccatccccagcaacgacggcaagtctgccgcatgactcagcgaatccagcgcacgcgaataccaggcgttcatctgctggcgataactcaccaggctctgatgaaagccgtccagttccatttcgatcagggcaatgtgggaagcgttggtcatccgtgacgtctcggcaaagggcaagacgtcggagcatgccccagcaaaaagcggctggatgaacggttggaaaattcagaaagagcccactgcgctgggggaaaaaccgcgaaaaatcagctcgaagtgctacaccgaaaagcgataaacctgattgcagaattgcccgccaaataaaaatcgctcgcatccttgcccgattccccgacatggccgtcatggttaatagaacctcccttacgcaggatttcccatgtcgcgccttgctcgtcccttgcacccactggccctgtcagtggcgatggcttttgccgccgtgccgttgctgaccgtccagtcctcctatgccgaagagagcagcagcgcgttgcgccgtttctcgatccctgccggtgacctgagtcaggcgctcaacaacctcgccgaacaggcgggcctggtgctggccttcgatgcaggcctgacccgaggcaaacgcagcaaggggttgagcgggcaatacgacaccgacgtggcactgaaccaattgctcgccggcagtggcttgcaagccttgaagatctccgccgaccgctaccgccttgaaaccatcccggataacggcggcgccatggagctgcaggccaccaccatcagtggcgcgtaccatagcgaaagcccgaccgggccggtggccggttatgtggccacgcgcagtttgtcggggaccaagaccgacactgcgctgatcgaaaccccgcagtcgatttccatcgtcaccaaagaccagatgcgcgcgcaaaacgccgagagcctcaaccagatcctgcgctacagcgccgccgtcatcccggaaacccgtggcgccactgcgtcgcgccttgaccaactgactatccgcggtttctccccggccacttacctcgatggcctgcgcatgccgtcgagccgtgacgccctgccgcagaaagacgcctttgacctggagcgcgtggaagtgctgcgcggcccggcgtcggtgctgtacggccagggcacgccgagcggggtgatcaacatggtcagcaagcgcccgttggatacgccgtttcatgaagtcggcgtggaatacggcaccttcaacaagaagcgcaccaccttcgacttgagcggcccgctggatgatcagggcgtgtattcctaccgcgtggccgggcttttcgacgatgccgatgggcaggtggagcacaccgagacgcgtcgtcagtcattgtccagcgcctttacctggcgcccggacgacgccacttcgctgaccctgctcgggcatttccagaaggaccccaagggggcgtcctatggctcggtgccggcctggggctcggtactgcacagcccgacagggcgcagcatcgatgtggatttctacgatggcgaaaagaatttcgagaaaagcgaccgcgagtactactccatcggctgggcgttcgagcatcacttcgatgacgtatggaccgtgcgccagaatgcacgttacctgcgcagcgaaggccagtaccgcagcctctacagcaactacctgatggcggattaccgcaccatccgccgctcgaccatcgccagcgatgtcgacctggatgcctacaccctcgacaaccagctgcaggccaaattcgacaccggcccgttgcagcacactttgttgatggggctcgactaccagaacaccagcaccgacaccaagtccggttccggcgtgtacactgcaggcccgaccctggatattttcaacccggtctatggcgcggctgtcccggtgccggcctacaccaccgacggcacttcgcgcagcgaacagaccggggtgtacctgcaagagcagatgaagtgggataagtgggtgctgttgctgggcggtcgctatgactgggccagcaccgataacagtacccagaccatcagcacgggggccaagagcaagtcgtccctggacagcaaggcgtttaccggtcgtatcggcctggtctacctctttgacaatggcctggcgccgtatgcgagttatgcggagtcgttcaacccgcaatcgggcaccggctacggcggttcggtgttcaagccgaccgaaggcaagcagtacgaaatcggcatcaagtaccagccgccgggcagcaacagctttatcaccgcggccatcttcgacctgcgccagaccaacgtgctcaccaccgacccggaccccacccacctgtgcggcaccgggcgctgccagagccaggacggcgaagtgcaatcccgtggcttcgagctggaaggcaaggccagcctcaacgataacctcgacatcacagcggcctacgcgtacctggacaaccgcatcagcaaatccaacaacactgtgcgctatgcgcccatcagcgatatcggcgtaggcccggccatcgccgccgaaggcaccaccacctacggcgtgccgcgccacaccgcctcggcgtgggctgactacaccttccacgacggccacctcaagggcttcggcgcgggtgcgggcgcgcgttatgtcgggtcttcctggggcgatacagccaacaccctcaaggtgccgggctacaccttgttcgatgcggcggtgcactacgacatccccaacattaccagcctgaaggacaacctgcgcctggcgctcaacgccaccaacctggcgaataaagagtatgtcgcgtcctgctactcctattcgtggtgctggtatggctcgcagcgcacggtgcaggcgagtgcaacctatcagtggtgataaggcaatttaatggcccccttgtaaccaaatcctcgccagaatcgcttttattttcaggtggttaggcgaggatgcaaatgcgcactgttggaatcatgctgatcgcctgctccctggccggcggcgcggctgccgtgcaggcacgggagttgcgcgaaggtgacaagtacatgtgcagttggggcgccggcacggccgccagggctcaggagttgaaactgtcgggggtgtcgctgtatgcggcgcgacagaagatccagagcatgaagttcaacaaatcctggatgcgcatgatggccatgggcatcaccgaacagacctacgacagccgttcgcggctcaagcccgaggccattcgccagggtttctatcaggattgcgtgcgctacaaggtcgcacgcaaatgatcgagcaagcaccggccagtacaaaatctgcgtaagcctgtccaacttttcctcggcggccctggccatactggcgccaggtaaacccgaggcacaggccatgactgactacgtattcacccccgcgccaaccccaaccctcgcagtccaaggcagtgatgcgcgcttcccgctgcgccgtgtgttctgcgtgggccgcaactacagtgagcatgcgcgtgagatgggtcacgacccggaccgcgagccgccctttttctttatgaaaccggcggacgccgtggtacccgccgaaggggtgatcgcctacccaccgctgaccgccgacctgcaccacgaagtggaactggtggtggccatcggcaaggacggagtggatatcgccccggaacaggcgttttcccacatctgggggtatggcgtcggcgtcgacctgacccgccgcgacctgcaagcccaggcgaaaaaactctcgcggccgtgggagtgggccaaggcgtttgatgcgtctgcgccgagcaccgcattgcgctcggtgagcgcggtagggcatccgtccagcggaaaaatctggcttgacgtcaatggcgaacagcgccaggtgggcgacctggccgaccagatctggtctgtcagcgaagtgatcagccatgcctcaaggtctgtcgcgctgaaggttggcgacctgatcttcacgggcaccccggcaggtgtcggtgccttgcagccgggcgatgtggtcacggcgggcatcgagggcatcggcgagttgcagttcaccctcggccaggcttgaggctaaagtggtgacccggccacccgagagaccgttatgccaggcacccgcgtcaccacctacggcatggaacaacgcagcgaccgccccgacttctacatccgtgacaagcgcgggcgggcgccgctgacccgcccgcatcggcatgaatacttccagatccagatcaaccttggcggcgacaccgtgcagcacatcggcggcgcggtgcggccgtttccgcgcaaggccctggcctttatcctgccccatcgcctgcatgtgattccccatcccgaagacggcgagttcatgctgatcaacttcagccagggctttttcctgccgcaactgacctgcgcccccctggacctcgaagacattcccatcggccaggcgcccgagctgtcgccgtttcgcttccaggaacacctggatttcatcctcgatgacgcagcatttgagcaggtgcaaagctggctcactcacatgcgcgaactggatgcccaccgcaccttcggcacccgcgaacgtctcaagggttacctgtttcaaatgatcggcctggtctgcgaacaatatgccgagccgttgcaggcgttcgccgccgataatgccacccggcgcgggcgcaaggatgcgttggcgcgggtgcagcgctacatccgcgagcatctgcacgagccgaccctcaaccttaccgacacggcagcggcggcgttcctgtcacccaactacctcacgcacctgttacgcaaggagaccggcaaacccttctcgcaactggtgctcgaccgccgcttgctattgacgcgcaccttgttgctcaacagtgcgcagatgatcggccccattgcacaccgctgcgggtttaccgatgaagcgtacttttcccgttgcttccgcaaggcccatggcctggcgccagggcaatttcgtcggcagcagcatggcgagtccttttaggcggcggtttacaaatccacgacaatcgctatgtttctatttgcatacaattgcgtccttcattgggaggccagtatgcaaacgcttatccgcgcagcgacgcaggacgatgtcgacacgctcttcacccttcgcacctcggtggtgcaaaaccatctgagtgtcgagcagatggccgagttgggcatcaccccagaggtgctggccgacagcatccgcgaagccccctgcgtatggatcgccgaagtggatggccggcccgtggccttcagcatggtcgacctggcgaccggcgaggtgttcgcgatgttcgtattgccgtcccacgagaacctggggctggggcgtcgactcatggcggtggctgaagccgcgctgtttgcacaccatgacaggttgtttctgatcaccgatgggcgcgacgaaatccgcgccaacgggttttaccaacgcctgggctggaccctgacggcgcaggtcgaggacggcgacgtgcgttatgagaagagcagggcgcagtgagccatgagtccacccgagccgccgtccaacaactttcgctacttcgtgttcgcagtgcttggcgcggcggtgttgctgggggtctattttgtgcagctcaatgcccaggtcgaccgcgagcgggatgcgaccaatgagcgcttggcgctgtgtcgacaggtggaaagtgtggcgcgctcggtgttgcccaatagcctcgatacacaagatgcctgcgaacagttgagcgagcgtatatcgaaaagtgtgacgtcgccttaactcattaacccttttttatcagtggaaatagtgccagtagttgcaccaaaaagtggcatttatagggttggctaccttaaaaaacgtgtggttattgaatgacttacagcgcttttaatccgacgaaaggattaaaataatcttgttacagctttttacaatcgttactatagccgggcgtttacctcccacggtttatgcatttttaaatcccaagtttccatcagctacttgggattttttttgcttggaatttgaccttcgcgtcaaacttcaccgtcggcgaactccgcgcgcatccggccattacgcttggcctggtacagcaacttgtcgacctcttcgacgaaccccagcatcggcgcatcaggtttcacgatacgtgtacccacgcccaggctcagggtcagcaggctcgataccgccgaataaccatgctcgatctgttgctggcggatcaggtgcagacagcgttgcgccacctgcctggccgattgcgcatcggtttccggcagcaaccacacgaactcctcgccaccgatacgtgcaatgaaatcccgtggccgattggctgcctgggacaaggtgtgcgccacctggcgcaggcactcatcgcccttgatatggccgtagtggtcgttgtactgcttgaagaaatcgatatccagaatgatcaacgacagcggcaactggctgcgctgggcgctggcccattcccgttccagcacggtgtcgaacatgcggcgattggcgataccggtcagaccatcttggtaggaatattcctcaagttgtttctgcaagcgcaccaggtgctcttcggtcttcttgcgctcgctgatatcgaacatgaaaccgatcagcgcctcgacctcgccgtccttacgcaccacgtgcaccacatcgcggatccacacgtagtcgccattcacgctcagcgcccggtagtctgcctcgtgatccacaccggcgcgggactgcgatacgcagaaattcaccacgtattcacggtcgtccgggtgcatgcgctcgacccagtcgtccacactgacccagctttgcggggtccagccgagcaacgtctcgatctgcgggccgatgtaactgaaggtcatgctctgccaatcaatgcgccaggggatggccttggtcgactccagcaaggttttgtacacatcgctgtcgggctggctcggagggtcgatgctcatggggcggctgctctggatgatggcgaaaagccaagagcgtctttcgatcggggcgcttagtcaagccttcggcggcgcagcagacgagaggtcgccaaacgggtttctggcgccagcgggccggcgtttccacaccgaaatgaggcatggctaacacttttgcacgaaccgctccatgccccgcagaacctcgtctactctggttccatcacaacaaccgggtgaggcccaggggtggggacttgtcatgatttcaatcattgaattcaaccgcatcatggcttcgggtttcctgccgctggcgtgcgattgcaccttgaacagcgacggctcgttgcgaatcactgtcttcgaaccggtgtccggccgggtcgacctgctgctgaccggggtatcccccgacggtttggacagcatccgttccatctcaaacctgattggtgagttgcgtaccgagatcaaggccgggcgtcgcgggtttgctgcggtgggttagccgttgacggtgtgggtgggagtatccagcgcgccgtaatagcgccagcagcaatggcgatgttccggcacgatcacgcagccgctgaggctgacgatcagcagtgcggcaaccagcatgtaaagtcggcggtacatggtgtttcctcttgggttgatcagcgttaatccttcaacgcagtcaccgacataaatccgtcgcgaagctttcaaacatttcatcaagccctgccaccccctgcgcaatactgctgaaaaacctgcgacggattttcctgcccccgccgttcaacccatcagcacccgcactttcgcgtgttgcatgaaggagttgccatgagatacctggccaaattgcgctatgccttgcttgctccgctggcccttgctgcgtttgtcagcacccccgtgtttgcccagaccgaaatcattatccgccagccaccgccgccggaacgtgtggaagtgatccctgtggaacgcccgggttacgcctgggaccgcggccactggcgctgggaagggcgcggctacgcttgggtgcccggtcactggcagccggtgatgcgcaatgcgcgctgggaaccgggccattgggaggctcacggccctaattggtactggcgcgaagggcattggatccgctgaccgagaattgcccgattgaaagacactgatccggacgtggaactgctggcgcgcatcggtaacaacgagcctgcggctgtcaacgaaatggtgacgcgcaaactgccgcgtctgctggcgctcgccggccggatcctgggggatgccgacgaggccaaggacgtggcccaggaaagcttcctgcgcatctggcgccatgcggccagttggcgcagtggcgaggcgcgcttcgacacctggctgcaccgggtggcgctcaacctgtgccacgaccgtctgcgccggcgcaaggagcgcccgttggaggacgaggaagcgttggcgctgacagacagcgcactgacgccggatgaacagctggaagccgccgaccgcagcgcccggatggctgccgccctggcggcgctgcccgagcgtcagcgcgaagcgattgtgttgcagtactaccaggagctgtcgaacatcgacgccgcggccctgatgaacatcagcgtcgaggcactggagagcctgctgtcgcgggcccgacgccagttgcgcagccaacttgccgacacacccgggcttgcccgcccaggaaggggaaaaccatgacacccgaacgctttgcttacctggccgacgcctatggcgccgacctgcaccgctggccccgcgccgaacagcccgcagcccaggctttgctggacagcggcaatgtgcttgcgcatgaggcccagcaacaggcgcgctggctcgacggtcaactggacagccatcaactggcctacgtcgatccttcgctggcacggcagattcggctgtcggccccgcgcggccagtcattctggtcgcgctatgcccgctggttgtcgccggccggcctggtaggcgtgggtgtcgcgggcatcgtcaccgggatgctcgtggcctccctgagcgtgccgctgccgatgtggtcgtccgaggtgttgcccagcgtcttcgatcaaggcgatgcgcaagtcatctttaccgtcaatgccgaggacaccgagcaatgagcctgaagtccctcaaaccctggctgctggcctcggtcttgctcaacgtgttcctgatcggcggcgtcggcggtggcctctaccactggatggccagtgccaagcccgctgaggcggtggtcaaccagcacggcttgcgccaggcgatgatcaagctgccgccggagcgccgccgggaattgcgccaactgctgcggcacaaccgggccgacagccagccgctgatcatggccgggcgtgaagcgcgcatgggcgtgatcaagcaattggaagcgccgaccctggatcgggatgtgctggtggcggaactggccaaggcccgtgaagccgatatggcgctgcgtgcgttggtggacacgacgttggcgcagttcgccagcaccctgcctcgggaggagcggcagaagttagtggaggcgttgtatctgcgggggcaggcggcaggccgcaagccttagtcctgaacgtggcgcttgtaggtctgcgcccggagcgctgaactacaggcgacgcagaaaggatttgacgatgtggcgggtggcatcggtggtgtccaactcgtccatggcgccataggggtgccactggcaatcgacgatttcattgcaaggtttcgcatcggcgacgttcaccaccgacgcttcgaacacgtggtgcacggtgtcgcgggccttgagttcctgcaaatacagcaagccgtccacgttcaatccggtttcttcttccagctcgcgctcggccgcgccgaccgggcgctcgttgcgttcgaccttgcctcccggcaatgcccatttggatctggccttgcgcacgaagaggatatgcccctcgtgttcgcaaatgaccgttgcacgtattttcatcgtctgtgccccgcagcgggatgagtgtcataaaagtgtaatgcaattgtcatgctgagtgcttatggcgctgacgtgtggggatgtggatactgcccgattgatcaaaacgcacgaggagggcagatgagcaccgtacgctggggcatgatcggctgtggcagtgtcactgaattgaagagtggaccggctttctacaaagcgccaggttctgcgctggtggccgtgatggggcgccgcgaagcggcggtgcgtgattatgcggcacgccatggcattgcgcgtttctacaccgacgcccaggcgctgatcaacgaccccgaggtggacgcggtgtacatcgccacgccgccggacagccatctcgaatatagcctgatggtcgcggcggccggcaagcattgctgcgtcgagaagcccatgtcgctcaacgccgagcagagcgcgttgatgcagcgcaccttcgagcgtgccgggctgcatctgtttgtgtcctattaccgccgttcgctgccgcgtttccagcaagtgcgtgactggctgcgggaaggacgcatcggcgaactgcgccacctcacctggaccctgtgcaagccaccgggcgccaatgatgccagcgccgccaactggcgcaccgacccggccatcgctggcggtggttactttgccgacctggccagccatggttttgacctgttccagtacctcgccggggacatcgtcgaggtctcgggctttaccgcgcgacaagccggggggtatgcggccgaggatgcggtgacggcgtgctggacgttcagttcgggcgcactgggcatgggctgctggaattttgtcgcggaccgtcgcgaggaccgggtggaactgatcggcagccgtgggcgcatccgattctcggtctttgaagaccagccgctgcaccttgagggtgaaaccagcgaggtgctggaagtgccgtgccacacgcatatccagtggcaccacgtgctggcgatgaatgcgcatatccgtggcgaagccgagcacccatcgctgggtatcgacgcgttgaagaccgatcgaatcctggacaaggtgctacaacgtaacccccatcgtcccgggtaggcggcatagggtggtcttttttccaaggaacagacagatgaaatactggatggcggtatggctggtactggcgacaagtgcgatggcggcgccgcgcagccaaggcacaccgggggagtttgatttttatgtgctgtcgttgtcgtggtcgccgaccttttgcctgacgcacccggacaacgagcaatgttccggcaagggctacggttttgtcttgcatggcctgtggccgcagtacgcgcgtggcggctggcctgcatcctgtgcgccgcagtcgccgttgagtcgcgaagaaatcgagaagggcgcaacactgttcccaacccgctcattgcttaagcacgaatggtccaagcatggcacctgcagtggcctggaacccttggcctacctggaaaaaaccgaccaggcgctgggggtggtgagcattccgcagcaactgcagccgttcaatacgccgccgtcgctgcaggccagtgagatcgaggcgttgttccgtgaaagcaacccgcgcatgggcaatcatgggctggcagtcatctgcaaaggcaaagtgctgtccgaggtgcgggtatgcctgaccaaggacctggccttcgccggttgcccgcgcagtgtgaaaacccaatgccgcgatggcgacatccggattcccgcgcagcggtgataagccgctggcgggcatcgggttgatcagttgttgaggtagaccgggctgtcggtggacaacgaggccttcacggccagggtcatgtcggtgatcaacacttcttcgcggtcttcgctcagggccttgagggtgatggcgaccacgtcctggggcgtgctcttcggcgcctgcacgtcggccaccatatcggtgtcgatgtaggcggggtgcacgccgatcaccagggtcttctgttcgcgcagttcgccgcgcagtccattggtcaggccccactgggcggacttggaggcgctgtagccgccagtgccgggcgggctgagccagctcaataccgacagcacattgatcagcgcgccgccgccttgcctggccaggatcggcgcaaacgcacggctgacgcgcagggtgccgaaggtgttcacgtcaaagtgctgttgcaggttttcgacgctgtcttcagccagcagcgagccgtatttcaggaaccccgcgttgttgatcaccacgtctacatcggtgcactgctcggcggcgcgctgcacgctggcctggtcggtgatgtccagggcaatcggcgtgctgccggggaggttcacgctgcctggatcgcgtgcgccggcgtagaccttggccgcgccggcttccagcaaggcaatgacgaatgctttacccaggccgcgattggcgccggtgaccagtaccacttttccacgaatatccatgatgcgctccagacagttgttaggtttaataatgaaaccgtttttatcctgagcctgttggtcctataatgcaaccttattttgcaagtgcccggaggcccaacgatgaaacgcaaatgcctggaaggcgatggctgcccggtggcccgcgccctggacgtggtgggcgactggtggacgttgttgatcatccgcgacgcctttgccggagtaacacgtttcggtgattttcaaaaacacctgggcgtggcgaaaaacatcctcgccacacggctcaaggacatggtcgagcaaggcctgttgcagaccagcgaagtcggtgcgcgcagcgagtaccagctcactgacaagggccgtgcgctgatgccggtgctggtgacgctggcgcagtggggccaggcctataccgagccggaggaggtcggcgcgcaagtcttggatgcgcgctcgctcaagccactgcgcaaggtcgagatcctcgccgaggatggccgagtgttgggcatcggcgacatcgtcacccagatgcccggggcttgaggcggtgcctacttgctgtcgaggaagcccagcagggctgcgttgaacaacgccgggtcttgcaggaacgcaaagtggctggtgttcggcaggatcagcaggccggcgccggggatggttgcggccatgtactcggtgtgttcgcgcttgatcgcttcgtcatggtcgccgtcggcaatcaggatcggcgtcttgatgctttgcaattgtgcgtcagtccagttcggttggctggcccacatatggctgatctgctcgacaaacgcgtcgtactctttcggcgtcggcgacagcttggcgtactccttgccggcgcgctcgatgaaggcggcaaaggtcgggttcttctcgacgccgtccttcacgcctgcggtctgggtgttggcggcgaaggcgaagactttgccgaggcggtccgggtgacgcagggccaggtcgatgccgatgatggcgccgtcgctccagccgacgatatcggcgctggggattttcaggtggtcgagtacggccaccacgtcatcggccatcaggtcataaccatagggtttttcatcccgcgaactgcgcccgtggccacggctgtcgatactgatcaccgtatgccttgccgccaaggccttgacttggttaccccaataatcggagttggacaggccgccgtgcagcagcaccaccggcgagccatggccggtacgggtgtagtagaccttgatgccgttgacggcggcatagccggtctgggcaccggccacaggggcgggcgttggcggcagcgtttcccagcgctcagcggcttgggcggcggaaaaacatagcatcaggcaggcggctgccagcaggcgacgtgacatggcggttcctttttttgatcaggagggattgaactctagcatcgccccccgcacggcaaatacgcatttttgcctatcaaaatcgcctgtgcgaaagaaaaaaatgcagttatatcaatggaataaaagcgtctaagcgagcgaggggcattttcttcaatacctcgaccgagtggcccccttaccgtggccccatcgtcattcgctcgaataacaaggaactgcaatgagtctgatcatttccatggctgccttcgcactcgccacgtctatcacccccggcccggtgaatgtggtcgcactgagttcgggagcgcgtttcggttttgtcgccagccagaaacacgtcttgggcgccgccgtgggcttcacgttgctgttggtgttgattggcctggggttgcatgaggtactgatacgttggccgatactcacccagttgatccagtggggcggggtggcttttttgctgtacatggcctggaagttggcggtagacgatggccggctcgacgccgatggcagtgccacggcgccgtcgatgctgtatggcgcgatcatgcagtggctcaaccccaaggcctggctggcgtgtgtggcggggatggggttgttcgtagccgatggcgatgcacggcaggtgtggttgtttgccgggctctacctggtgatctgctatctgtcggtggcgtgctgggcctatgccggcacgtttttgcggcgctacctgggcaacccccagggcgtgcgcgtattcaaccgttcaatggccgcgttgctggtggccagtgtgggttatttgctgatggcttgagcacgtcgcggtattgccctggcgttgcggcgaaatgctgtttgaacgcgcgctggaaatgcgcctggtcggcaaaccccgccgccagggccacgtcggcgatgggcgcgccctgacgcaatcgggcgcgagcgaactggatgcgctggttgaccaggaaggcatggggtgtcagcccgtaatattgcttgaaggcgcggatcaggtaggacggcgacagttcggccgccaggcagatgtcttccagcttcaccccttcggtgcagtgcgtgcggatgtactcggcggcccgctccagcttgtggttgacctcgcgcagcggggtgccggctgggttgaggcgctgttgtacgtcgctgaagtaactcaccagcgcgtcctgtttctgcaagtgctcggcctgttcatcgaccagaatgcggtacaactccagcaagccacggtacagcacggcgtcctgggtatggggcgtgttgaacggccggtaaccctggtcggtgctgaagcccaactgatgctgcaactccgtcagccagggcgtgtcgatgtacagcatctgataggaccacggctcattatcgatggggttgcaggcatgcacatcgccggggttcatcaacaccaccgtgccagcgctgatctggaacgtgtcggtgccatagtggtagtagctgcgcccgctggtgatcgcgccgatggaaaaatgctcatgggcatgccggctgtaggtgaccttgcgcccatcagcgatggtgcgcgcctcgatgaaggccaacgcggggtcacgccagaaacacggagcagtggcagcagtcatgggcgggcgcttcctcgcagcaggtgaacgggtagggcagcagcgtcagctaaaacccgccattgttcaagccctggcgtaccagtggtgcatagcgtcgcaggtagtcggcccatgggtcgttgccgctcaccgcctctgccagggtgatcggcagccgggcattttcacgtagcgcctcaccgtcatgcagcagatgccgctcgacgatgacacgggtcaatgcgcgggtgcgtggtgagtcgaaggtgcgcgggacccggcgtccgaagaggtccggtgcgggtattgcggcgggcgccaggttgtcgagttgacgaatgaccagggcgttgtcggcagtggtcagcgccacctcggccggtcgggttccttgcgcataggccggccagtcgaaacgcatccaggcactgctggcgccgttctcggccgcgtgtgtgacctgttcatagtcaaggtctggacgtggacgaaccagcaggtgcctgggaaagatttcatagaacttgcggtcgccgtagtgcgagacatacatcagcacgccgaatcggccgacatcggcagcccgccgctgggcaataccgaaaaaccccaccaggccgtactccagggcttcacgactgggcaaggtcaggtgcgacaaccaataccggatggcagtcccataagcgtctttcagttgcccgagcttgcggtcaaaggtctcgaaaaacagccggttgatcggggtcagcaaatggaattgccgagccatttcccggtatttgaccgctgtgtttgtggagtgccagcgtgtcgacgtgacatcgagcgcgccagcactgtgcaagtcgacgaacgagtacagtgggccgctgtacacaccttcgaaacggccttcttcggaaaatggcgagttttccggcaggtacatcaatactggttgatccaacagaggggtgttggggtaaaccctgcgcagatcttccagggcggtctggcgtagggtcaccacgggctgcgcaaacgtctcgagcgcggcggcaaggctggctcgctgttggttgaggctgtccagcgccgtgttgatcgcctgcacatcgtaatgcggttgagggcccagtatgccgttgaccacggcccactccagcaccggcggcgctgcttcgctgctctcgataaagcgtttccagctgccttgtggcgccagcccggccaggaacatgatctggctgtaggtcaattgacgggaagaccctggcatgaccttttccatgtacatgacgtattgacggtacaacacccaggtctgggcactgaggcaaggcgttgcgtcgggtatgccgcgtacgagcaagtgcgggcttttttcgctcagcaacaggtgcgcggccagtgctgcggtggctgcgtcgagcccgttcaggctgctatcgatgttctggcgtacaaacggcacgtgttcgccccagaagtaatcggagtgccagtcgattaggttgatacgggtggggtatgcatcaggctccgggtccaggctcaggatcagggcggcgagtatcagcgcggtgcggctgcctcgctccgtacgttcacctgcatggccgccatgccagtgcagggcgttcgacaaagcctctgccagttgctgggccaagggtgtcgcgagcaggcggaccatgaggaaatccgcctccgccctgacatcggctatggacttgccggcgacgatgggctggccgaggtactcgaacagcggcacgtcctggtcagccatgaagcgctcgatgatgcgcacaatctgcgcacgctcgagcaccgacagtttccaggccgaaggctgtgaaccgtacagcggcttgagcgctcgccagtagtgcccctgacgcgccggcagcggttggctgaccgccaattgctgcaaggtcaggcgtgcctcatccaaggtctcggggcgttcaaggtgatacaggcgcagcgcctgagaaagcgtgaccttgaaacgactgcgcaggtacccaccggttttagccgcgagctgtttgaggggagggaccagggaggcaagctcgatattgctcatcaccggatcggtcaggtttttccaggtgccatccaggccattggcgcccacgctgccggtggcgctgagcagcacatggctgtcggggtcgatacgttgctgggtgcggatggtcaggaagtccgggtgatcggtcagcgtgttgagcgccgcgtaggcttttttaacggtcgcctggagggtgtccgggtcgacgttgctgccgatatcgagcgtgtcggcatcgctcaggttgccgccatcgatcactgtcgataacccagcgcgcagcgcgtggcgatcgttgagcaggccgacgtactgccgatagcgatacagttcgccgaatgagcgggcgctgttcaataccaccgggggcgcaggcgccggccagttgcgcaggcgctcgctcaggaagctgacctctgtcctgttcagcgggcgttcgatggcgtacgcctgtaaaaccccgacaatactgatgcgccggtcgggataaagatgactgcccagttgttcgcccagcgttccaagcctgtgccaccgcgcatcgggcacatcgggcgccagggtgttcatctccagcccgctgtcggggctcagcacgcacaacacttgccgctggtaatcgtagtaagtgggccgcggtgcgtcgtctgtggtgcccaggtcgtggtgatcgatgattgcccgcaacagatcggcggcctctttaaggtttctggccagccgcgagtccgactgcagatacagcgcagtgctgtagacgtcgaaagcgttaaagctgttctcgtccctgaccagttgttgcagggcgtcagccagttgcacgtagtcgcgcgcctgctggcccagttcggcgtagctcatcgacttgctgcgcccgttgtcatcaaacccgggaaaaccttgcaaggcctcgagttcttcgacaatggtctgcgcctggaggcggttcgcaggcattggcaagccatggaacgccagggtcaggttcaagggaaagctgcgcacgccggcaggaggtacaggtgcgatatacggcatgcccagctcggtcgggtccaggagttggctgatgtagatgatcgggttggccagtgtccaccaggcggacgagtcggccaggcaatagaccttgggttgcccgtgagccgtcacgctgagccgactgttgtgcacccgcagcgtagcgagatcaaacccttgggcgttggcccagtcgatgaaatctttctggttgatggctttgcaaaaggcttcgcaccactggcccaactgtgaatgctcgatcatggttacggggtgcgtgggaagcggcaacgcttggttcgaggcggtggccaataggcgggtcagttgcgcgatcaagggtgggtcgccctcgttgcgcagggtctggcgctcgctcaggtaggcgctggaggggctgacactgagtggcaggggcgtgtcgctgggcaggttgtcccaggtcagggcaagggcgtgaatgtcatccatgagggcggttccggctgatcaaaccccggatgatccgccccagggatggggcatctgtagcaggcgtttcctgcaaggccgtggcttgcgtcagccacggcggcaaggttcaggccggcgctcagaagtcccagcgtgtcgccaattgcaggctgcgcggctcgccatagaacccggtgccgaagttgcccagcccggtgtagtactttttgtcgaacaagttcttcacgttgagtgtggtgctcaagtgctcgttgaagcggtagcgcgccatcaggtcgaccaggtagtagctgtcctgggtgatgcgcgcgttgtggccgaagttgacggtgtcagtcggatcgggctgggacacgttgccgaagaattcactctgccagttcaccccaccgccgacggtgacgttctctagggcaccgggcaggcgataggtgctgaacaggcgcaccacctgctgcggtgtggtggtttgcagcaccgagctgtagacgtagtcgtccttggcatcacgggtgtgctggtaggtgtagccggcggagacgttccagccgtccagcacttcacccgacaactccgcttcaaagcccttggtggtggcgccggcgatggggcggtacaccgagtcggtctcgaagcccgagacgtattcggccacgttgtcctgctggatacggaacgcggcaaagctggcgttcaggcgcccgtcgtagaacgcagccttgagcccggcctcgtaggtttcgccctcgatcgggtcgagcagtttgcggtcggcgtccttgctggtttgcggacggtagatctgggtgtagctggtgtacaccgaccaggtgtcgttgaggtcatagacgatgccggcgtagggcgtgaccacgccgctctggtgataagtggtgcggttatcggccttggtcgggtcgtagaaatcggtggtgtcggtgccgctgaaggtgctgacgcgggtgccgaggatcaccgacaaatcatcggtgggcttcaggcgcgtggccaggtaggcgccggtctggcgctgcacgatatcgttctggccgctgcgcgggatgtccggcttggcgtactcgccgtgccagtcgaagatactgccgcccaccgctgggtagatcgagccgtacaccggcacgtcctgtttcgagcgggtggccatgaagcccatgatcagttcgtgttcacggccgagcaggctgaacggcccgctgaggttgacgtccagggtgttctgcacctgatcgcccttgtacttgcccatgaacatgtacatgttctggccgctgaccgggtccgggttgccgccgctggcggatgcgagcagggtgtcgtgctggctgcgcttgcggtcgaggctgactttgagtgaccagtcgttcgccagcttctgctgcaccgaggcgaacagcgtctggttctggaagtcgcggcggctccagtcggcggccgggttgaacgaacgcgaaaagttcgtgcgcgagccgtcgctgaaatacatcgggaatccggtccagctggcaccacgtgagcgggtgtcctgctggtcgatgccgaaggtcagcagggtgtcgggtgtgaggtcggcttcaaggatgccgtaggcgatgtccttggtgttctggtagtggtccaggtacgactggcgatcctggtacacaccgacaaaacgcccgcgcacattgcccgacgccgtcaaggggccggagatgtcgccttcggtgcggtagttgtcccaggagccgaaggtctgggtcaccgaagccttgaacgctgccgtgggttttttgcggatcaggttgaccgtggccgaggggtcgccggaaccgctcagcaggccggccgaacccttgatgatttccaggtggtcgtacaccgccatgtcggtgctggtggtgccgtagtcatacacgccgtcataggtggaattgacaccgtcgtactggaaattggtgatcggcaggccacggctggaaaactcccagcgctcgctgtcgtagttctgcacgctcacgccgggggcacggcgcagggtgtcagcgatgctgttggtgccctggtcgtccatttgctggcgggtgatcaccgtgaccgactgcggggtttcgcgcatcgacagcggcaggccggtggccgaggccatggagccggtggtgtacgaatgggtgtcttccgtggtggcgcccaggtcctggcccgaaatcgtcgtggcggccagctccagggcgccggtgttggtcgggatcagttccagtacgtagccgttgttgccttggggcagggcctgcaaaccgctgccctgcaacaggcgctgcaagccggccgccggggtgtagctgccattcaggccggggctggttttgccggcggccaggctgttgtggcccgcgatgaaaatacccgactgctcggcaaagctgttgagcacgctgaccagcgggccggcagcgatgtgatagctgcgtgaagcttcctgggtcgagggcgattcggcggcttgcagcgacggtgcgcccaggcaaaacagcgaggtggccagcgccagtgggcgcagcgcgaagcgggcaggttgcgacatggatgtttccctttggatcagatcgatcggcgaattgaaagcgtctgctgggttaaccgaacgaaggtgggaaaagggaactggtgctgagcgtttttttactttgggccgacagtgacccaccacggcatcggtttatccacgcgaatcggcagcgccgcctgcaacaaacccagggcgtggtcgctgtcttgcagcgggaatgaccccatcaccggcaagtgcgccacggctgggtcgcagcccaggtggccggggcgatagcgattcagttcggcgatcaattggccgagcggcaggttatccgccagcagcacgccccggctccaggcttcacgggccggggaggcgggcagggtcgggttgaaaccgttggcggtgaacgacacttgttggccggtttcgatgatgcgcacgtgctggtcgagggcggtgacttgcacccgcccttcgaacacgttgagctgggtgtggtgttcgccgtgcagcacactgaaacgtgtccccaacgcctgcaggcggccgtgtccggtgtccactaggaaaggccggagggcgtccttggcggtgtcgatcagcacttcgccaaagcgcaactgcaataaccgctgcaccgcatcaaagcgcacgtccacagcgctcaaggcgttcaaccacacatggctgccatcggccagcagggcgtcgcgcgtctcaccgctaccggtggcatagtccgcgcgccaaccgccgaccaaccggggcaggacggtgttgcgccaagcgccccaggccaatgtcgaccccccgcacagtaccagcagcgtcttgagggtttgccggcgcgagctgcgcaacgcccggctcgcgccatggggttgctccatcaagggcgcaaagcgctggctgacgcgttccacgtactgccatgcggccaagtgctcggggttctgcgcgacccaggtttgccagcgttgctgttcctgcgtacccgccgggtcctgcaggcgcacgtaccactgcgcggcctgttccaggctggcgtggctgagcttgccgggcgtgttcattgcaccaccatcccgtcgagctcggcttccaagatcgcgcagtgcagcagggcctgggccaggtatttcttgaccatgcgttcgcacacgcccaattgcaggccgatctgtttgtagggcaggccgtgcagttgagcgagcaggaaggcttcgcggacgttcctgggcaggcgagcgagcatggcgtccacttcgtagagggtttcgacgatgattgcccgttgctccggggacgggtgcgtgtcttccgggcgttgcgccagcgactccaaccaggctttttccagttggcgacggcgccagtggtcgatgcacaagccacgggcgatggtcgccaggtacgagcgctggcgcacgtgatcggtctcggccaccgggcggttgaggatgcggataaaggtgtcgtgggccaggtcggcggcatcccagcggtcgttcaggcgccggcgcaacaggccgagcagccagctgtggtgggtgccgtagaggtgggtgaaagaggtcgacacaatatccatccaacgcaaaaggattggcgtaaataagaattggtcgcgattaaagcaaagggagggggcgtgcgcaaatgatattggattgctattgggtgcaatcccctcccaggtttgaagggtgtcaggctggaaccaggaaagccgcctccagcagttgccgggtgtaggcatgttgcgggtcggcaaagatcgccttggcatccccttgttccaccacctgcccatgcttgaccaccatcaactggtgactcaacgccttcaccaccgccaggtcatggctgatgaacaggtaggtcaggttgtacttggcctgcaggctgcgcagcagttccaccacctggcgttgcaccgtgcggtcgagggccgaggtgggctcgtcgagcaggatcaggcgtggcttgagcaccagcgcgcgggcgatggcgatgcgttgccgttggccgccggagaactcatgggggtagcgatgccgggactccgggtccaggcccacttccttgagcgccgcgataatcgccgcttcctgttcggccggcgtgcccatcttgtggatgcgcaagccttcgccgacgatctcactgacgcacatacgcgggctcaggctgccgaacgggtcctggaacaccacctgcatttcccggcgcaacgggcgcacctgctgctggctgagcgtgtccagttgctggccttcaaaacgaatgccgcccttgctggcgatcaaccgcaggatcgccaggcccagggtggacttgcccgagccgctttcaccgacgatgcccagggtctgcccctgaggcaggctgaagttgataccgtccaccgccttgacgtagtcaaccgtattgcgcaaaaaacctttcttgatcgggaaccacactttcaggtcatcgacctccagtaacggtgggccaacctcgttggtcgccgggccgccgctgggttcggccgctaacaactcctgggtgtacgggtgctggggcgactggaacagcgtctcgcactccgcctgctcgacgatgcagcccttttgcatcacgcatacgcggtgggcaatccggcgcaccaggttaaggtcatggctgatcagcaacagcgccatgcccaggcgtgcctgcaattccttgagcaattccaggatcttcaattgcaccgtcacgtcgagtgcagtggtcggttcatcggcgatcagcaactccggctcattggccaaggccatggcaatcatcacccgctggcgctggccgccggacagttcatggggcagggccttgaggcgcttgtgcggctcgggaatacccaccaggtccagcagctccagggtgcgctgggtggcgaccttgccttgcagccccttgtgcaggcccagtacttcgttgatctgcttttcgatggtgtgcagcgggttcaaggaggtcatcggctcctggaagatcatcgcaatgcggttgccgcgtatgtggcggatggttttttctttcagggtcagcaggtcctgcccggcatactcgatggtgccagaggggtgacgtgccagcgggtagggcagcaggcgcaggatcgagtgagcggtcaccgatttgcccgagccgctttcacccaccagtgcgatggtttcaccgcgcttgatatcgaagctgacattgttcaccacgcggtggtggtgttcgcccgtgacgaactcgacggagaggtcgcggatttcgatcagattgtcctgattcatctcatttcctcgggtcgaaggcatcgcgagcggactcgccgataaacaccagcaaactcaacatgatcgccagcacggcaaaggcactcatgcccagccacggcgcttgcagattggatttgccctgggccaccagttcacccagcgacggcgaaccggcgggcaaaccgaagccgaggaagtccagagcggtcagcgtaccgatagcgccggtgaggatgaacggcatgaaggtcatggtcgacaccatcgcattgggcaaaatatggcggaacatgatcgcgccgttctgcatgcccagggccctggcggcgcgcacatattccaggttgcgcccgcgcaggaactcggcgcgtaccacgtccaccaggctcatccacgagaacagcagcatgatccccagcagccaccagaagttgggctgcacgaagctggcgaggatgatcaacaggtacagcaccggcaacccggaccagatctccaggaagcgctgcccggccaggtcgacccagccgccgtagaaaccctgcagcgccccggcgatcacgccgatgatcgagctgagcacggtgagggtcagggcgaacagcaccgacacgcggaagccgtagatgacccgcgccagcacatcgcggccctggtcatcggtgcccagcaggttgacactggaaggcggcgcgggggccggcaccttgaggtcgtagttgatgctctggtagctgaacgggatcggcgcccacaaggtccaggcgtccttggccttgagcagctcctggatgtacgggctcttgtagttggcctccagcgggaattcgccgccgaatgtggtctccgggtagcgcttgagcgccgggaagtaccagccaccgtcgtaatgcacggccaggggtttgtcgttggcgatcagctcggcgcccaggctcagcacgaacaggatcaggaacagccacagcgaccaccagccacgcttgttggccttgaaacgttcgaaccgacggcgattgaggggggacaggttcatctcaatgctcccggctggcaaagtcgatacgcggatcgaccagggtgtaggtgaggtcgccgatcagtttcacgatcagccccagcagggtgaagatgaacagcgtgccgaacaccaccgggtagtcgcggttgatcgccgcttcaaagctcatcaggcccaggccgtcgagggagaagatcacctccaccagcaacgaaccggtgaagaagatcccgatgaaggccgaggggaaaccggcgatcaccagcagcatcgcgttgcggaacacatggccgtagagcacacggtggttggtcaggcccttggcttttgcggtgaccacatactgtttgttgatctcgtcaaggaagctgttcttggtcagcagggtcatggtggcgaagttgccgatcaccagggccgtgatgggcagcgcgaggtgccagaagtaatcgaggatcttgccgccccagctcagctcatcgaagttgttagaggtgagcccacgcaacgggaaccagtccaggtaactgccgccggcaaacaccacgatcagcaggatcgcaaacaggaacgccgggatcgcgtagccgacgatgatcgccgagctggtccacacgtcgaaatggctgccatgccgcgtggccttggcaatccccagggggatcgacaccaggtacatgatcagcgtgctccataacccgagggaaatggacaccggcatcttttccttgatcagatcgatgaccttggcgtcgcggaagaagctgtcgccaaaatccaattgggcgtagttcttgaccatgatccacaggcgttcaggcgccgacttgtcgaagccgtacatcttctcgatttccttgatcagcgccgggtccaggccctgggcgccacggtagctgctggaaccggccaccgacacttcggcgccgccgccggcaatgcggctggtggcgccttcaaaaccttcaagcttggcgatcatctgctccacagggccaccgggggcagcctggatgatgacgaagttgatcagcaggatcccgaacagtgtggggatgatcagcaacaggcggcgaaagatataggccagcatttaatcgcctccactcgccggatcggcgctggtgttggtgtctgggatgacggccggtttgacgtcgggcttggcccaccaggtggcggtgccgacgtcgtagcgcggtgggaccttcgggtggcccaggtgatcccagtacgccacgcggaaggtcttgatgtgccagttggggatcacgtagtagccgaactgcaacacgcggtccagggccttggcatgcgccaccaggcttttgcgcgaatcggcgtcgatcagctcttccaccaactggtcgatggccgggtccttgaggcccatgtagttgcggctgccgggcttgtcagcgctggacgatttccagaactcgcgctgttcgttgcccggtgaagtggactgcgggaagctgcccaccagcatgtcgaagtcccgcgagcggatacggttgatgaactgcgacacgtcgacccggcggatcaccaggttgatgcccaggtcggccaggttgcgcttgaacggtagcaggatgcgttcgaactcggtctgggccagcaggaattcgatagtcaccggtttgccggtggtgtcgaccatcttgtcatcgacgatgcgccagccggcttcctgcagcagttggtaggcttcgcgctgctgggcgcggatcatgccgctgccgtcggtcctggagggttcgaaggcctgggtgaagacttcgggcgggatcttgtcgcgcaggggctcgagaatcgccagttcatccgggccgggcaggccggtggcggccatttccgagttttcgaaataactgcgcgttctggtataggcaccgttgaacagctgtttgttgctccactcgaaatccagcaacaggctgatggccttgcgcacgcgcacatcctggaacatcggtttgcgcatgttgaacacaaagccctgcatcccggtggggttgccgttggggatttcttccttgatcagccggccctgggcaacggcgggaatgttgtaggcattggcccagttcttcgcgctgaattccagccagtagtcgaactgcccagccttcaacgcctccagcgacacggtgctgtcgcggtagtagtcggtgatgcggttgtcgaagttgtagaaacccttagtgatgggcaggtccttggcccagtaatccttgacccgctcgtagcggatcatgcgcccggccttgacctcggcgaccttgtacggcccgctgcccagcggtacttccagattgcccttggcaaagtcgcgggtggcccaccagtgcttgggcaataccggcagttgcccgaggatcagcggcaattcacggttattggtgcgcttgaacttgaacagaaccttgagcgggtcttcggcgatcacttcgtcgacgtcggcgtaataggtgcggtagatcggcgagccttccttgatcagttcctggaaagtaaacaccacgtcctcggcgcggatcgggtggccatcatggaagcgcgcttccgggcgcaggtagaaacgtacccagctgttgtccggagctttttcgatcttgccggcgaccaggccgtattcggtgatgggctcgtccaggctttgcatggccagggtgtcgtagatcaggcccaggttgtcggccggtacacctttgctgatataggggttgaggctgtcgaagccgcccatggccgactcgcggaacgtgccacccttgggcgcgtccgggttgacgtagtcgaagtgcttgaagtcggcggggtatttcggcggttcgttgtacagcgtcaacgcatgttgcggggcggcgtgggccgcagtgcacagcagcaggctgccgagcagggcagtacgcaaagatatcattgggctttctccgaagctttcagccaccacgcgctcaggcccaggctgtagggcggcgtggtgacaaaggcgaaccggtcgcggtacgccaggcgatgatagttgaggtaccagttgggaatgctgtagtgctgccacagcagcacccggtcgagggcacggccggcggccagttgctcttcgcgggtcttggcggccagcagttgttccagcaggtgatcgacaatcgggttattgatgcctgcgtagttcttgctgcccttgatcgccgcctggctggagtggaagtactgccactgctcaaggcccgggctcaaggtctggttgagggtgatcaggatcatgtcgaagtcgaattgatccaggcgctgcttgtattgggcgcggtcgacggtgcgcaggcgcgcgtcgatgccgatgctgatcaggttctcgacatagggctgcaggatgcgctccaggttcgggttgaccagcaggatctcgaagcgtagcggctggccatccttgttcaccaggcgctgcccggacagcttccagccggcctcgccaagcagggccagcgcgcggcgcatggtttcgcgggggatgccgcgcccgtcggtctggggcaggctgaaggcttgcgtgaacaggttggccggcagttgctcgcggtacggcgaaagcatcagccattcatggccggtgggcacgccggtggcggcgaattcgctattggggtagtagctcaaggtgcgcttgtacgcactgctgaacagggtgcggttggtccactcgaagtcgaacatcagccccagggcttcacgcactttggtctggctgaaggtgggccgccgcgtgttcatgaacaggccctggctctgggtcgggatctggtgggcgatctgcgccttgatcacgtcaccccggttcaccgccgggaagttgtagccattggcccagttcttggcctggtgctcgatgtagatatcgaactcaccggccttgaaggcttcgaaggccacatcgctgtcgcggtagaactccacctcgaccttgtcgtagttatagaagccctggttcaccggcaggtccttgccccagtaatccttgacccgttcgaacatcagttgccgcccgggcgtgaccttgctgatgcggtaggggccgctgcccaggggcggttcgaaggtggtggccttgaagtcgcggtttttccagtagtgctggggcaataccggcaattcgcccaggcgcaggatcagcaaggggttgccggcacgcttgaacacaaagcggatgcggtgtcggttgagcacatccacccgcgccacttcctgcaggttggtgcggtattgcgggtgcccttcggtcagcaaggtgcgataggaaaacgccacgtcatacgcagtgatcggcttgccatcgtggaagcgcgcttccgggcgcaggttgaacaccacccagctgcggtcctcgctgtactccaccgattgggcgatcagcccatagctggaggtgggttcatcgccggagggcgcgtacaggccggtgccaaccatcaatggctcattcagctcattgacgccatattgcaggaagttcggcgtggacaccgggctggagcccttgaaggtataggggttgagggtgtcgaaagtgccaaaggccatgacccgcaaagtcccgcctttcggcgctgcagggtttacccaatcgaagtgggtgaatttggccgggtacttgaggctgccgaactgcgcataaccgtggctctcggtaatcgtcgcgttcgctgcaaagctcaaggccagacttattagtagaaggaggggacgcttcaagtcagagatccgatccaggcggcttgggctttatgatcggtacagtaacagcttgttccggttggaaaaagccagtcggctgatgcagggccaatgtgggagggggcttgcccccgatagcggtatacctgccgatgaatctgttggctggtacattgctatcgggggcaagccccctcccacatggattccccagttttcttgaaccttagcgtggacctgataccaccagcatctgcccaggcttcagggcctggccggtacgcgggttccagcgcttgaggtgttgcatctcgacattgaagcgcttggcgacgatgtacaacgagtcgcctttcttgaccttgtattgcaccggcttcttgctgtcggccttggccaccagcttgcgcgtgtcctgcatcaccagggtctggccgaccttgagcgcctggccgttgagcttgttccagcgctgcaggtcatgcacgtcgaccttgttggccttggcgatcagcgtcaggttgtcgccggtgcgtaccttgtagctgcgggtacgcccggccacccgtgcggtctcgacttcgtcgaacacctgctttttaggacgcatcgccagcaattcttcaggcttcatcgtcgaaagcgtgctggtcagcaattgcgccttggaactgggcaccagcaaatgctgcgggccatccagggtggtgcgttgtttcagcgccgggttgagctggaacagttcgtcttcgtcgatctcggccagcgcggcaacccgggacaggtccatgctctgcttgacttccaccacttcgaagtacggctggttggcaatcgggttcaggttgacgccataggcctcgggtgccagcaccacttgggacagcgccaggaacttgggcacgtagtccttggtttcctggggcagcggcaggttccagtagtcggtcggcaggccgagcttctcgttgcgctcgatggctcggctcaccgtgccttcgccggcgttataggcggccagggccagcagccagtcgccgttgaacatgtcatgcaggcgggtcaggtagtcgagggcggcggtggtggaggcggtgatgtcgcgacggccatcgtaggcgcgggtctggcgcaggttgaaatagcgcccggtggaggggatgaactgccacaggccgaccgcatcgctgcgcgaataggccatcgggttgtaggcactttcaatcactggcagcagcgccagctccaggggcatgttgcgttcttcaaggcgttcgacgatgtagtgaatgtagaggctgccgcgttctccggcgttctccaggaaggacgggttgctggcgaaccacaggcgctgttgctcgatacgcgggttgacgcctaacccgtcctgcagctgaaagccccggcgcatgcgttcccaaacatcctggggcacatcgggcgtcggtttttctgaaagccagatgacgggtttctgtttgattttggcggtaaggtttggcttgggttgcacggtggattgtgcggtgaaattgcttgattggcagcccgccagtgtggcggacacagccaccgccacagcttgagccaggcgggtcaatgcgtctgaatggttggatttacgaatagatgacgacattggctggaagtaagttccgggcaaaaatgtcgggcgattctagaaacccgctgggttccggtcaaccattcagaaattacgtatcagattgcttcccgttagaacttatctttccaggccctcaagctagcaaacacctcggccccagagcggttgtcgcggccgttccgttcgtccgctttttgtttaacggatgtttcagaggtgcgtagaaatgggttggtcagcttttccagggccaggttggaaggcagcgtgatctcgcccctggcgcgcagttggcgtacgttttccactcgttcggctatatctgtgttatccggttccacagcctgggcgaacttgaggttactctgtgtgtattcgtgggtgcagtacaccaaggtttcggcgggcagggcggccaggcgttcgagggaggtgtgcatctgttccggcgtgccttcgaacaggcgcccgcaaccggcggcgaacagggtgtcgccacacaacagcacgcctggatgataaaaggcgatatggcccagggtgtggccgggcacgctataaatgtcgaagtcccagccgagtaccgtgatgcgctcgttatcgtgcaacgccacgtcccgcgccgggatcctctcgttggccgggccgtagaccttggcgtcggtctcacgcttgagctgttcgacaccgccgacgtgatcgtggtgatggtgggtgatcaggatgtcgctgaggctccagccagggttctgctcgagccaggccagcaccggcgcggcatcgccggggtcgactacggcgcagcgttgggtgcgagggtcctgtaacaaccagatgtagttatcggtgaaggcgggcagggcactgatctgtatcattcttcgattcgccaagctgaacacattggtgcatcttagaacgtctaggcgagttggagaatgcaatgactgataaagcgttcgcccaggccgatcctgagtggctggccctgatcggcgcggcccgcgagtggctgtccggtcccatcgggcaatttctgctggacgaagaacggcgcatgctcgaagacgagctgggccggttctttggtggctatctggtgcactacggcccctcggccgaaacgccgccctgcgcgccgcaggtgcaacgtaatgttcgcttgggggcaccgttgcctggcgtggagattgtgtgcgaggaacaggcctggccgttgagcgaacatgctgccgatgtggtggtgttgcagcacgggctggatttctgcctgtcgccccatggcttgctgcgcgaggcggcgagcagcgtacggcccggtggccatttgctgatcgtggggatcaacccctggagcagttggggcctgcgccatgtgtttgcccatgatggcctgcgccaggcgcgctgcatctcgccgcaacgggtgggcgactggctgaacctgctgggcttcgcgctggagaaacgccgcttcgggtgctatcgtccgccgctcgcgtcgaccaagtggcagggccgcctggccggctgggagcgccgggccggcgcctggcaattgtccggtggcggcttttatctgctggtggcgcgcaagatcgtggtcgggctgcgccccgtgcaacaggtgcggcgtgagccgatgggcaagttggtgccattgccgatggccaaggtcaaccgcaagcaaagcgaagcgtaaccctctttttgaattgataccgagcaaccgatgaccgatagcgtagaactcttcaccgatggcgcctgcaagggcaacccgggccccggcggctggggcgcgttgctggtgtgcaaaggtgtggagaaggagttgtggggcggtgaggccaacactaccaacaaccgcatggagctgatgggcgccattcgtggcctggaagaactcaagcgccgctgcaatgtgctgctggtgaccgactcgcaatacgtgatgaagggcatcaacgagtggatggtcaactggaagaagcgcgggtggaagaccgctgccaaggaaccggtgaaaaacgccgatttgtggcaactgctcgatgagcaatgcaatcgccatgacatcacctggaagtgggtgcgcggccatatcggccaccccggcaacgaacgtgccgaccagttggccaaccgtggcgtggacgaagtgcggggctacaagcagagctgatgctgactcacgtgttaacattgcgccctttgactcacaccacaccgttgagagctgaaccctgatggccatccgatctgttgtactcgataccgaaaccaccggcatgccggtgactgacggccaccggatcattgaaatcggctgtgtcgaattgatggggcgtcgcctgacgggtcgtcacttccacgtctacctgcaaccggatcgtgacagtgacgagggcgcgatcggcgtccacggtatcactgacgaattcctcaagggcaagccgcgttttgccgaagtcgccgatgagtttttcgaattcatcaacggcgcccagctgattatccataacgcagcgtttgacgttggcttcatcaataacgagtttgccctgatggggcagaccgatcgcgcggacatttcccagcactgctcgatcctcgataccttgatgatggcccgtgagcgccacccgggtcagcgcaacagcctcgacgccttgtgcaaacgctacggcgtcgacaactccggtcgtgaactccacggcgccttgctcgactccgagattctcgccgacgtctacctgaccatgaccggtgggcagaccagcctgtccctggcgggcaacgcctccgatggcagcggctcggcggaaggctccggcaaccgtccttcggaaatccgccgtttgccggctgatcgcaagcccaccaccatcatccgtgcgagtgagcaggatatggctgaacatgcggcgcgactggaggcgatcgccaagtcggcgggcgcgccggcgttgtggacccagctgacccagcaataacccctggctggactcgattaaaaatgtgggagggggcaagccccctcccacaattgatttcaattgcctgtaaatcttcattcgcgtcatggtcccccagcttctacccttgagtgcatagccctcaggacgacaagcactcatgtacaaagacctgaagttccccgtcctgatcgtgcaccgcgacatcaaggccgacaccgttgccggtgaccgggtccgaggcatcgcccgggagttggaacaagagggcttcagtattttctctgcagtggactacgccgaaggcaggctggtggcgtcgacccatcatggcctggcgtgcatgctgatcgccgccgaaggcgctggcgaaaacacccacctgctgcagaacatggtcgagctgatccgcctggcgcggctgcgggcgcccaacctgccgatctttgctttgggtgagcaagtcaccctggaaaacgcgcccgccgacgccatgagcgaactcaaccagttgcgcggcatcttgtatctgttcgaagacaccgtgccgtttctcgcccggcaagtcgcccgtgcggcccgcacgtacctggatggcctgttgccgccgttcttcaaggcgctggtgcagcacacggcggattcgaactattcctggcacacgcctggccatggcggcggcgtcgcctatcgcaagagcccagtggggcaggcgtttcatcaattctttggggaaaataccctgcgctcggacttgtcggtctcggtgcccgagctgggttcgctgctggatcacaccgggccgctggccgaagctgaagcgcgcgccgcgcgcaactttggcgccgaccacaccttcttcgtgatcaacggcacctccaccgccaacaaaatcgtctggcattccatggttgggcgcgatgacctggtgctggtggaccgtaattgtcacaagtcggtgctgcattcgatcatcatgaccggcgccatcccgttgtacctgtgcccggagcgcaatgaactggggatcatcggcccgattcccctgagcgagttcagccccgagtcgatccgcgccaagatcgacgccagccccttgacccgtggccacccgccgaaagtgaagatggcggtggtcaccaattccacctacgacggcctgtgctacaacgccgagctgatcaaacagcaattgggcaacagcgtcgaggtgctgcattttgatgaggcctggtacgcctacgcggcgtttcatgagttcttcgccgggcgctacggcatgggtacctcgcgcacgccggacagcccgctggtgtttaccactcactccacccacaaactgctggccgctttcagccaggcttcgatgatccacgtgcaggatggcggcgcacgtcaactcgaccgtgaccgtttcaacgaagccttcatgatgcatatctccacgtcgccgcaatacagcatcattgcctccctggacgtggcctcggcgatgatggaaggcccggccggacgctcgctgttgcaggagatgttcgacgaagccctgagcttccgccgcgccctggccaacctgcgccagcatatcgccgccgaggactggtggttttccatctggcagccaccgtcggtggcggggatcgacaaggtcgccaccgctgattggttattgcacccccaggatgactggcatggcttcggtgatgtagccgaagactacgtgctgctggacccgatcaaggtgacgctggtaatgcctggtctcaatgccggcggggccttgagcgattgcgggatcccggcggcggtggtgagcaaattcctctgggaacgcggcctggtggtggaaaagaccgggttgtattccttccttgtactgttctcgatgggcattaccaaaggtaaatggagtaccttgctcaccgaattgctggaattcaagcgcagctacgacgccaatatcagcctggccagttgtttgccatcggtgtttgcccaagggccgacgcgctaccaaagcatgggcttgcgcgacctgtgtgatcaattgcacagctgttatcgcagcaacgccacggccaagcatctgaagcgcatgtacaccgtattgccggaaatcgcgattaagcccgccgacgcctacgaccaattggtgaggggcgaagtggaggcggtttccatcgacgccttgccaggacgcatcgcagccgtgatgctggtgccttatccgcccggtattccattgatcatgccgggcgagcgctttaccgagtcgacgcgctcgatcatcgactacctggcgtttgcccggacgttcgatagcagtttccccggttttgtcgctgatgttcatgggttgcaacacgaagatgacggcagtggtcgttgttacaccgtcgattgcatcaagggttgaggatggttatgcaagctgtaatgaacccgaagtatccggggctcagtgtacgggtcgccgacgagggctttgatgcctacgtgtggggtaatgacttcagctttgaagtcagcgcctacggtgagccgcaaatgggcaagcgggtcgaccagtggcccgtggagcgtatcttgccgtaccgcaagtgctacggcattgaccctgaggagttcgccagtttccgtgacgcgcccgacagtgcgatcttcatggcttacctggacgaccgcgcggtggggcacatcgtggtcagcaccaattggaacggctttgcccatgtcgacgagttggcggtggccctgcctgcgcgacgccatggggtggccaaggcgctgctagatgtggcgcagttctggagccgcaagaaaagcctgcccggcatgatgctcgaaacccagaacaacaacctcggtgcctgccgcttgtacgagcgttgcggctatgtgatgggcggcatcgaccatctgcgctatcgcggtatcgacccgcagacccgcgaagtggcgatattctggtatcggttgttcaaaagcgaagccgacaacgcttaacccgccagcaaaccctcggccttctgcgtcacgatctccagcaacgcattcaacgccggggaggtcgggccatccttgagcgtcagcgcatacaggctgaccatgatcggcggcgacaccgggcacgcatccagcccggcctcgcgtgcgccgaacgcggtgaacgggtcgaccaccgccaggccttcgcctgcttccaccatgctgcgcatcatctggtaggtctgcacccgcgtctgcactaccggcagcgggcgcaaggcttgcagcttggcgtccagcaggcggctgagcgggtcctggccctccaggccgatcatcgactgcccggcgaggtcctgcagcgcaatgtacttctgcttgggtttcagccagccatggggcgccagcagttgcagcttgccctgggcgagtacggtgcagtggatctgcgggtgttccgggtcatgcaggctcaagcccacatcggcttcgtgcagcagcaggctcctgacgatctcgcgggtgggctggctcgacaggttgcagggcgtgtcctggaagcggcggcgcaataccgcaatgctttgcggcaacagctgattggccaggggcggtgtgcagagcacgcgcagggtaggggcatgatggtttttcaggcggctggccaggcgttgcaccggctccagggcctcatacacatgggcaatttccgcctgcagttccagggtttcccgggtggcctgcaagcgcccgcgtacgctggcgaacagcatgaagcccaattgctgctcggcgtccttgagcgccgcgtccacctcgcccacggaaagttgcaaccattcggcggccgtgccgaggtgtccggtctgcaagatggcctgaatcacttcgatatgacgtaaacgcatcgccggagtctatgtgcagcgggccgggtattcaatagaatggctgcgctgatcattaacgaccaaagccggctgccggcattaacaacaaaaacaggtctggtctcacatgcctctaccctcgatattcctcggggtaacggtcaagcaactgctggtcctggtgaccgtagggtgcgtggctgcttatctcttcaacagtcaaaacgataccgcgccggagaacctggcacttgaagcgtttatccgttcccaggaacaggtcgtcgaacaggtgggagcggtgctgggtattgaactggtcaggcaggtggtggcgcatccaggctacaacacggcaggctaccagcgttccatgttcgcggtggagggtgagcgggggagattggtggtgaccgtgaagaaggtcgagggcgagcagggcattgaagtgacggagatccgccgtccgtgatcaccccagcccagtcaacgccgtcaatggccaggactgagcaggtggataaggcgggatcttatgacgcgagggtggtttgcgattcgcgcacgagaatggtgcccgactggatcagcttgaattcgtcgccttccagtttctctacacggtcgccaatggccagcttgtaggtaatggtaggtgccgagccagccaggtcgccttgcgccgggttggattcctggaactcatgcaccgaatacacgcgtccttctgcgtctctggcatgaaactgtccgactaatactgctgccatctgtttagaacctctggagataaacactcgatttgcggttctgtagaccgtcatggagcggggtagtttacttacggaataaaaatactattcgccgacgttttcagatgcttcctacatagtgttgcgcagtgcaaacaaccgcaggattatcaaaaccttctggtgaaccggtcgcgaagactctataactacaagctccttttagtcagacgtcgggaaaccccaatgagcaaggtctacaccgtcgccgtcgtggtcggcagcttgagaaaagactctatcaaccgcaaggtcgcgctcgcattggccgaactggcccctgccaacctgaagttgaacattgtggaaattggcgatttgccgctctacaacgaagacattgacggagcatcaccgccggcagcctacagtactttccgcaaacaggtgagctcatccgacgcggtgttgttcgtgaccccggaatacaaccgctccgtcccggccccgttgaagaatgccattgacgtgggttcccggccctacgggcagagcgcctggagtggcaagcctggcgcgatcatcagcgtatcgccgggtgcgattggcgggttcggcgccaaccatcacctgcgccagtccctggtgttcctcgatgtgccgtgcatgcagcagccggaggcttacctgggtggggcgggcgccgtgtttgatgaggggggcaaggtctccgagaaaaccaagccgttcctgcaggccttcattgacgcctatagcaagtgggtggccaaacagcacggttgattacaaggaggcccggccgcaatggccgggcttttttgcgggtcaggccagttgatctgccaacaacagagcgagcgccgtgttgttgaggcgtgatgcctgatcgacctccggccccaggatggtcttttccacgtacaacgaatgcacgtccgtcaccccgataaagcccagccaggcgtccatatagggcttctggaaatccatcgcctgggcgtccggcgccgaaaaatccataccccgcgcgtacacattcaccgctgtcttgttgcgcaataacccgcgcaggccgtgctccgggctgaactcgaacagcacatctttctgcgacaccacatcgataaagtgcttgagcttgtaaggcaccgcgaaattccacagcggcaccgagaacaccagcacgtcagcctgatgcagctgggcggcgagtgttttgagtgcagaccaggcgatggcttgttcctcagtcaacggcgtaccgctgagcccggcgtacttggcgtccatcaccgggccgtcgaattcgggcagctccaatgcccacagatccagcgtattcacttgggtgtccggcgcgttttgttgatagcgggcaataaactggcgagcgatttccaatgatgcggagcgttgtttgcgcggtgagcattcgatgtgcaggagcgtagtcatggcaggcctcggataaagatgacccgagcattgcaacatagcgttgattgaaatataaatcgtgttttactagctcattgattgcgtatcaaaatatgttcgatagcgtattgctcaaaaccttcgtctgcgtcgtggatgagggcggcttcagtcgcgccgccgagcgtttgcacctcacgcaatcggcggtcagcgggcacttgcggcgcctggaggaacaggtgggcaagccattgctcacgcgcaccacgcgttctcaacagctgacagcggacggcgaacgcctgatggcgtatgcgcggggcatcctggcgttgaatcgtaatgcctgggccgagctgacgcgctcggcgttccagggaaacctgcgcgtaggcgtgtcggaagagtttgcgcaggcacgcctgttgcgcgagttgcaggaagtcgccgcgcactatcccggtatgcaaatcactgtacaggtcggcattcccggttcgctgctggcgttgatgaagcagggcgaactggatgtggtggtgggatcgttgtgtgaatccagcgagcccggcctggcgttgtggcaggaaccgctggtgtgggcctggtccgccagccgatgacgacattgcctgcgcccttgcccctggcgttgtttcccgaaccatgcccttaccgcgaagcggcgctgtcacgcctggcccaggccggcatcgcccagcgcaccgccatgctctgtacgagctacgccgcgctgcatgccgctgcattggccgggtttgccatcgcccccatcgcccgtagccaactggtgcccggcttgaccgtgctcggcgccgaacacggtttacccgcgctgcccgatgccgaattccgcctgttcagtgcgccggacgccgaccctcgcctggtcgaggtgatcacccaggtagtggtccgctacggcgcttccttgcgctagcgcggctcagcgcagccagttggtgcgggccagttcgatgacttcatcgccgcggccgctcatcaccgccttgagcatgtacaggctgaaccccttggcctgttccagcttgatggtcggcggcatcaccagttcctgagtggcggtgaccacatccaccagtaccgggccgtcatgggccagggcgcggcgcagggccggttccaggtcctcggattgctccacgcggatgccgaggatacccatggcattggacatggcggcgaagtccgggtttttcagctcggtgccggcgtccaggtagcccgccgccttcatttccatggcgacaaagcccagggacgagttatcgaacacgatgactttgactggcaagttcagctgcgccagcgagatgaagtcgcccatcagcatggcgaaaccaccgtcacccgacatcgagatcacctggcggcccgggaatgctgcctgcgcgccaatggcctggggcatggcgttggccatcgagccatggttgaacgaaccgatcaggcggcgcttgccattcatcttcaaatagcgtgcagcccacacggtgggggagccgacgtcagcagtgaagatcgcgtcgtcatccgccaactcgctgagcaagcgtgccacgtattgcggatggatcggtcgattggcctttgacggctgagccaggtcatccagcccttggcgggctttttcataatgcttcaaggacgtgtcgagaaagctgcgatcggtcttgcgcgttaaccgtggcagcagcgcactgatggtttcgctgacgtcagcggcgatgcccaagtccagcgtggcacggcgaccgagcgcttgggggttgcggtcgacctggatgatcttggcgtcggtggggtaaaactggcggtaagggaaatcggtgccgagcatgatcagcgtgtcgcagtcgagcatggcgtgataaccggagctgaaaccgatcaggccggtcatgcctacgtcgaacgggttatcccactccacatgctccttgccacgcagggcgtgcaccacgggagcgcccagtgcgtcggcgagggcgaccacttgatcatgggtgccggcgcacccgctgccgcacagcagggtaaccttgcggctgctttccaggatatcggtgaggcgttgcaggtcctgttccgccggcagtgtgcgcggtgcatgcagggcgggccacggcttgagtttgtcctcgacctccagcagcgatacatcgcccggtattaccaccacggccacgccgcgattgaggatcgccgagcgcatggcgcgatgcagcacctggggcatctgttcggggttggtgaccagttcgataaagtggctgcactccttgaacagttcttgcggatgggtttcctggaagtagttcaggccaatctctgaggatggaatttgtgcggcaatcgccagtaccggcacatggttgcgatggcaatcgaacagcccgttgatcaaatgcaggttgcccggcccgcaactgccggcgcacaccgtcagctcgccagtagccgccgcttcggcaccggcagcaaaagccgccacttcctcgtgacgcacgtgcatccactcgatgctgtccatggtgcgcagcgcgtcggtgaggccgttgaggctgtcgccggtcaggccccagatgcgcttgatgcccgcctgttcaagggtggtcgccaactgttgggccaggttgattttcgccatgaagaactccaatcgtcagtgaggttaaaaactgctgatcaataggggacagttcgatcacggcgaatgctccgcctttaatgtgaagattgcgtcatggctgcacggtattgccgggtgcgtcgggccagaaaccattggtcacgcaccagcgccatgcagggcgcgacgttggtcttgggcaaatggccgcggctgaggcggcgcatctggtagcgcaccacggcgagaatggccagggaggccaggggcttgcgcttccagtcgatgggtttgagttgcgggttggggtcgcggccttcgcgccagtgctggatcagttgtggctccagcgtcagggcggtggcgataccggccatggcgatgccgctgtcgagcacttgttgcacgatgggcaggcgacggatgccgccggtgaccattactggcatctgggcaatggccgcgacttcgctggcgaattcaagaaaatacgcctcacgggccagggtccggccgtcgcgtgcttcgccttgcatggccggtgcttcatagctgccgccggacaattccagcaggtcgatggacagcggattgagcatctcgaccacggcgcgtgcatccgcttcttcgaacccaccacgctggaaatcagcggagttgagtttgaccgacacacaaaacgacgggctgacacaggcacgcaccgcacggatcacgtccagtagcaggcgtgcacggttctccagtgaaccgccccagcgatccgtacgttggttgctcaatggcgacaggaactggctaagcaagtagccatgcgcaccgtggatctgcacgccggtgaagccggctttttcggccaggcgtgcgctggtggcgaagcgctggatcacgtcctggatgtcggcctcggtcatggccttgggcgtggcaaacatcttcgagaaaccgcccaggtcgagcgccacggcggacggtgcaatggcctgctggcgcaggttggcgggtgtctggcgtcctgggtggctgagttgcacccagaagtgcacgttcttgcgccgcgccacgtctgcccattcgcgaaagcgctgcagttgctgctcgtcctcaagggcgacgccgccggggccggtcatggcgcggcggtcgaccatcacgttgccgctgatcaacaggcccggctcgccatcggcccaggccgcgtagagctgcatcaactcaggggacggcgcttgccgggcatccgccatgttctcttccatcgccgccttggcgatacggttggaaaggacttggccattgggcagttgcagggcttcaaagggtgacatgggttgactcctgagcgggggaggcctcaggctaagcttaaaggtaactttaaggtcaagcaggcattcgatgaatattggcgaactggcaaaacagagtgggctggcggcgtcgcgtatccggttctatgagtcgcaaggcctgatcagtcaggtcgggcgccaggccaacggctatcgacgctatgcaccggaagcactgcagaccctgcaactgatccagagcgcgcagcaggccgggttcaccttgcaggagctcaaggcgctgatgcccgcgccaggggagcacaagcgtgaggagctgatcgaagcactggaacgcaaggtgatgcagatcgaagaaatgcaggcacaactggcccacagcaaggcgcaactactgggtgtgctcgaggcggtgcgagcgcagccggaaggggtgccgtgttcgatggggcagaagcaggtgctggcgtcgatcaagaccgatgatctacagagcaagtagatgccaatgtgggagggggcttgcccccgatagcagagggccagtcaacagattcattgactgatccaccgccatcgggggcaagccccctcccacatttgaggctcagcgccggcggaacaacggcagtggctcatccgttgccgcctggtacgtcaccgagaagtcctggagactttccagtgcttcgtacgggtctttgtccgcgcgcagggcgaaagcatcgaagccgcagcggcgcaggtagaacagctggtcgcgcagcacgtcgccgatcgcacgcaactcacccttgtaaccgtagcggtcacgcagcaggcgcgcgttggagtagttgcgaccgtcggtgaaggccgggaagttcagggcgatgacctggaagtgctccacgtcatcaccgatttcctcggcttcttcatcggcgtccagccacacgcccaggccgccgtcgcgggccttgagggcatggccgtgttcgcgccacagggccaacggcacgatcaggtcgtcgcagttggagatgccgtcgaagctcgcgtccttgggcagcaggtgccaggtttcgtcgaggacttcgttgttcttaatgattcgctgcatagacgcgctccttgaacaggtcgatgccgatgcgctggtaggtgtcgatgaaacgctcatcttcggtgcgctgttcgatgtacacgtcgatcagcttgccgatcacctcgggcatggcttcctgggcgaaggatgggccgaggatcttgcccaagctcgcatcgcggctggcgctgccacccagggacacttggtagaattcttcgcctttcttgtccacgcccaggatgccgatgtggccgacgtggtggtgaccacaggcgttcatgcaaccggagatgttcaggtccagctcgccgatgtcgaacaggtagtccaagtcgtcgaaacggcgctggatcgattcggcgatcgggatcgacttggcgttggccagggagcagaaatcgccgcccgggcagcagatgatgtcggtcaacaggccgatgttcggcgtggcgaaaccaccttcgcgcagctcgccccacagggtgaacaactggctctgctcaacgtccgcgagaatgatgttctgctcgtgggaggtgcgcagttggccgaagctgtagcgctcggccaggtcggcgacggcgtccagctgcttgtcggtgatatcgcccggcgcgacgccggtaggtttcaacgacagggtcaccgccacatagcccggcttcttgtgcgccagggtattgcgcacacgccagcgggcaaaacctggatgttctttgtccagtgctgcgagctcggcgtcctgattgctcagagccttgtactctgggtcgacgaagtgcttggctacgcggtgcacttcggcttcggtcagggtcgtctggccaccgcgcaggtgttccatctcggcgtcgactttctgggcgaagacttcaggggtcagggccttgaccaggatcttgatccgggccttgtacttgttgtcgcgccggccgtagcggttgtagacccgcaggatcgcgtcgaggtagctcaacaggtcctgccacggcaggaactcattgataaaggcgccgaccaccggggtacggcccaggccgccacccaccaggacacggaagcccagctcgcctgccgcgttgtgcaccggctccaggccgatatcgtgcacttcgatggccgcacggtccgaggtcgagccattgatggcgatcttgaacttgcgcggcaggtaggcgaattcggggtggaaggtggtccactgacggacgatttcacaccacgggcgtgggtcgatcagctcgtcggcggccaccccggcgaattggtcggtggtcacgttgcgcaggcagttaccactggtctgaatggcgtgcatctgcacggtagccagttcagccaggatgtccggcacgtcttccagcgccggccagttgaactgtacgttctggcgggtactgatgtgggcgtagcctttgtcgaagtcacgggcaatcttggccatcatgcgcgtctggcgcgatgtcagctggccgtagggcacggccacccgcagcatcggcgcaaagcgctgaacataaaggccattttgcaggcgcagagggcggaactcttcttcgctcagttcacctgccagatagcgtcgggtctgatcacggaactgcttgacgcggtcctcgatgatgcgctgatcgtattcgtcgtatacgtacatataggtcctgttctcggcaaatctgcgcgcacggccgcgcactcccaacggagccggcgcacgataccagtttgcgtttatgcgcaaaagtgatgtttgagtatatgcaaataaccaaattgactaatgagaaccgttatcgccatacccacatttgtcatgcgggcaatcgtcgactttactgtgagcgtgtttgagcgtattcaccgataaaaccgataagaggcgatgcgatgagcaatccgacaaaagcccgtaagcccgacagtaccgtggacgcctgggccattctgtttctgatcatcctggtggtgggaaccgccgtattctgggtgagccaccagtaaagagcctcgattgactgccgtgttgccactatcatggcggtcactattccaggctcgaaaaaccatgtcgaaggtgctgattgcgtgtgtgtggttgctgggaacggcgtatggggccatggcccatgccacgtcggtggtgtttctcaacccgggcatgtcgacggaaaccttctgggtcagctacgcgcaattcatgcaggccggtgccaaggacctcggcctgcatttgcgtgtgcgctattcagagcgggatgccaacaacacgctgatgcaggcgcgtgaggcattgcacggcagcgagcgaccggattatctggtgctggtgaacgagcaatacgtcgccccgcagatcctgcgcatggcccagggcagcggcgtgaagctgctgattgtgaacaacgcgctgaccgccgatcaggtgcgcttgcttggcaatggcgacggttgggttgccagcatggtcgctgatgatgaacaggccggctacctgatgctcaccgatctactacgccagcacggtaccgttgctgctggccaatccatcgaactgctggcgttctccggcaccaagaccaccccggctgcgcagttgcgcgaacagggcctgcgccgcgccttggccgaacaccccgaggtgcgcctgcgccagttggtctacggcgaatggagccgccagcgcgcctacgaacaagccacgctgctgttcaagcgctacccgcaggctgcgctggtgtggtcggccaacgatgagatggcgctgggggccatgcgggcattgcaggacagcgggcgtgtgccgggcagggatgtgttgttcggtgcggcgaacagctcgccggatatcctgcgggcgcggcttgacggtcgcttgagtacgctggtcgcggggcatttcaccctgggcggttgggcgatggtattgatcaacgatgatgcccagggtgtggatatcgacgcccatggcgggcgtgaccggcaggaggcgttattccaactgatcgatacgacccaggcacaacgcctgctcggccccatggcgccggtggatttccgcgcactgtcagccgtcggcaagccggcgtcctaccgatacccctttagcttgcaactgctgctgcgctagacgcccgccaggtgcagcaccagcttgacgataccgaacagcgtcaacgcaaacacagccgtgaacagaatgcccagcaccacaaaatggctgggcttgccgtgggtgaagtcgcgggcgcggttcttgccgctctgcacgccaaacgcggccgccaccacgctgtgcagcatctgccagaaggtagggggcttgttgttgactggatcgtccatacatccctcgacacaaggtgtgtgagggagagcatagacaatccagcggggcttagttgtcgtaacccaggttcggcgccaaccagcgctcggtcacgctcaggtcctggcctttacgcgccgtgtagctggtcacctggtccttgtcgaccttgcccacggcaaagtactgcgcctgcgggtgggcgaagtaccagccgctcaccgcagccgccgggaacatcgcgtagtgttcggtgaggaacacgccgctgcgaccggcctgcatctcgcgggcctcggggtcgagcagttggaacagttgggccttttcggtgtgatccgggcacgccgggtagccgggggcagggcggatgccgctgtattgctccttgatcagcgcctcgttgtccagttgctcgtccttggcataaccccagtgctctttacgcacctgctggtgcagccattcggcgcaagcctcggccaggcggtcggccagggccttgaccatgatcgagttgtagtcgtctcccgcgtcttgatacgccttggcgacttcttcggcgccgatgccggcggtggtgatgaagccaccgatgtagtcggtcacgccgctgtccttgggcgccacgaagtcggccagggagaagttcggcttgccgtcggtcttgatgatctgctggcgcaggtggtgcaaccgggcaatcggctggccgtcatcgccgtagacttccaggtcatcgtcctgcacctggttggtcggccagaagccgaacaccgctcgggcgctgatgagtttttcgtcgatcagcttcttgagcatttcctgggcatcggcgtacagcgcagtggcggcctcaccgaccacttcatcgtcgaggatgcgcgggaacttgccggccaggtcccaagagataaagaacggtgtccagtcgatgtactcggccagcaccttgaggtcgatattgtccagcaccttggcgccggtaaaggtcggcaccactggcgtgtagctgctccagtcgaactgcggcttcttggcgatggcggccgggtagctcaggcgttcggtgcgggcgctacggttggaggtgcgttcgcgcacttccacgtactcttcgcgggtacgctcgacaaagccggccttgagttccttggacaacagctgcgtggccacgccgaccgcacgcgaagcgtcggtcacgtacaccaccgcatcattgctgtacttgggctcgatcttcactgccgtgtgcgccttggaggtggtcgcaccgccgatcatcagcggcaggtggaagtcctggcgctgcatttcgcgggcgacgtgcaccatctcgtccagggacggggtgatcaggccggacagcccgataatgtcgcacttctgctccttggccacctgcaggatcttctccgccggcaccatcacgccgaggtcgacgatgtcatagccgttgcagcccagcaccacgccgacgatgttcttgccgatgtcatgcacgtcgcccttcaccgtggccatcaggatcttgcccttggcttccggcttgtcgcctttttccagctcgatgaacgggatcaagtgggccacggcctgcttcatcacccgggcggacttcaccacttggggcaggaacattttgccggcgccgaacaggtcgccgacgatgttcatgccggacatcagcgggccttcgatcacttcgatcgggcgcgcgaacgacagccgggactcttcggtgtcttcaacgatatgcgtggtgatgcccttgaccagggcgtgctccaggcgcttgttcacatcccagccacgccattcttcggtctcggcttccttgacgctgccgtcgcccttgtacttgtcggcgatggcgaggagggcgtcggtgccgtccggcgtgcggttgagcaccacgtcttccacggcgtcgcgcagttctaccgggatctggtcgtagatctccagttggccggcgttgacgatgcccatggtcaggccgttgcggatcgcatacagcaagaacaccgagtggatcgcctcgcgcaccgggttgttgccacggaacgagaacgacacgttggacacgccgccggaggtcagcgcgtagggcagttcgtcacggatataggcgcaggcgttgatgaagtcgacggcgtagttgttgtgctcttcgataccggtggcgaccgcgaagatgttcgggtcgaaaatgatgtcttccggtgggaagccgacttcattcaccaggatgtcgtaggaacgcttgcagatctctttcttgcgcgcttcggtgtcggcctggccggcttcgtcgaaggccatcaccaccacggcggcgccgtagcgcttgcacagcttggcgtggtggatgaactgctcgacgccttccttcatgctgatggagttgacgatgcccttgccctggatgcacttgaggccagcctcgatcacgtcccacttggaggagtcgatcatgatcggcacgcgggagatgtccggctcgccggcaatcaggttgaggaaggtcaccatggccttcttcgaatcgagcatgccctcgtccatgttgatgtcgatcacctgggcgccggcttccacctgttgcagggcgacttcgagggcttcggtgtagttgtcttcacggatcaggcgggcgaatttggcggagccggtgatgttggtgcgttcgccgacgttgacgaacagcgaactgcgatcaatcgtgaacggctccaggcccgacaggcggcacgccttggggatgtccgggatcacgcgtggcgcgtaaccggccacggccttggcgatggcctcgatatggcctggcgtggtgccgcagcagccgccgacaatattgaggaagccgctctgggcgaactcttcgatgaccttggcggtttccgaaggcagttcgtcgtactcgccgaattcgttgggcaggccggcgttggggtgcgcggacacgtgggtgttggccttgttcgacaactcttccaggtacggacgcagttcgctggcgcccagggcgcagttcaggcccactgaaatcggcttggcgtgggcgaccgagttccagaacgcttcggtggtctggcccgacagggtgcgaccggaggcgtcggtgatggtgccggagatcatgatcggcagttcggtattgagctcctcgaacacaccttgcacggcgaaaatcgcggccttggcgttgagggtgtcgaagatggtctcgatcaggatcaggtcggcaccgccttcgatcaggcctttggtggcctcggtgtagttttccaccagttcatcgaaggtcacgttgcggtagccggggttgttcacgtccggcgacaacgagcaggtccggctggtcgggccgagcacgccggcgacgaagcgtggcttggccgggttctccagggtcttggcgtcggcgatcttgcgcgccaggcgtgcaccttccacgttcagctcgtaggccagttcttccatgccgtagtcggccatggagatgcgggtggcattgaaggtgttggtttcgaggatgtcggcaccggcatccaggtaggctttttcaatgccgccgatcacgtccgggcgggtgatcaccagcaggtcgttgttacccttgacgtcgctcggccagtcggcgaagcgtttgccacggtagtcgtgttcttccagtttgtagctctggatcatcgtgcccataccgccgtcgaggatcaggatacgttccttgagggcttgatgaagggcttgcagacgaacgctacgatcggacatgggactactctggtcaggcattacggagggcgtggatcataacaaacctgtgcggctttgcagcatgcccggtttttacatgaatatcgctcatgttgcaggggcgcatggcccggtagaatcatcggcaatttttcagcgcacgcattgaatcgggaccggatacatgtcacttcgcctcatcaccagcgccgtcctggcactggttgcctgcatcgctcaggccgacggatccgccccggcgatttcctacacccgcgacattcaaacgatcttcaccgagaaatgtgtggcctgccacgcctgctacgactccgcctgccagctcaacctgggcagtgccgagggcgcggcgcgcggcgcgagcaaagtgccggtctacgatggcgaacgcagccaggccgcgccgaccacccgcttgttctatgacgcctttggcaaacaggcctggcagcagaagggcttctattcagtgctggacgcccagggcagccaggccgcgctgatggcgcgcatgctggagctgggccataacgcgccgttgcaacccaacgccaagctgcccgaagacattgtgctgggcctgaaccgcgagaacatgtgcgccatgcccggcgagttcaacgcctacgccggtgcccaccccagggaaggcatgccgctggcggtcaccggcctgaccgaccagcagtaccagaccctgcaacgctggctggcgtccggcgcgccaattgatgagcaaggcctcgcgcccagcgcgaaagaagccctgcaagtgcagcagtgggaaaacctgttcaaccagcccggcgcccgcgaaagcctggtggcgcgctggttgttcgagcatttgttcctcgcccacatctatttcgagaatggcgagccggggcatttcttccagtgggtgcgttcgcgtacgccgagtggccagcccatcgacctgattgccacgcgccgtcccaatgatgaccccggcacccgcgtgtattaccgcctgtggccggtgcagggcgtgattgtgcataaaacccacatcacctacccgttcagtgccgagaagatggcccgcatcaaagagttgttctacgccggcaactggcaggtcaacgccttgccgggctacggtccgggccgccgcgccaaccctttcgaaaccttcgaagccatcccggccaaggcgcgctaccagttcatgctggataatgccgagtatttcgtgcgtacctttatccgtgggccggtgtgccgtgggcagattgccacggacgtgatccgcgacaatttctggaccctgttccaggacccggaccacgatctgtacatcaccgatgcacgttatcgcggccaggccacgccgctgctggccatgccggggcagaacgatgacgtgggcagcgtgctcagcctgtggctggcctaccgcgataaacgcaacgaatacgaagccctgcgccgtgacagctacgctgacctgccgccgccaagctggtcgagcctgtgggcgggcaatgacaatgccttgctgagcattttccgtcacttcgacagcgcatcggtcagcaaaggcctgatcggtgaagtgccgcagacgatgtggctgttcgactatccactgctggagcgcacctattaccaactggcggtgaactttgatgtgttcggcaatgtgtcgcaccaggcccagacccggctgtacttcgacctgattcgcaatggtgccgagcagaacttcctgcgattgatgccggccgattcgcgcgatgatttcctcgacgattggtaccagaacagcggcaagctcaagctgtggctggattacgaggccattgatgacgacaaacccaccggcctgcacctgaacgaaaaggatccgaagcgcgactttgccaaccagttgctcacccgttacggcgatttgaatgccagcccggacccgatcaaccgttgcagcggcgcctattgctcccgcgatgggatcgacccggccttgcaggatgcggagcaggcactgagccgcctgacctcacgcccagctgccgggctcaaggtgattgatcaattgcctgaagcgacgatgctgcgggttgaaaccgccagtggcaagcgtgtggtctatagcctgctgcgcaatcgtgctcacagtaatgtcgcgtttctgctgggcgaggcttatcgctatcagccggggctggatacgctgacgatttatccgggtgtgctgagcagctacccgaactttatgttcaacataccggcacaggaagtgccggagtttgtggcggaaatggagcaggccaaggatgccaagggtttcgagaagattgtggatcggtggggggtgcggcgcagtcatccactgttctggcagtatttccatgatttgtcgcagtacattcgtgagactacgccggtggaagagggcgtattggacatgaaccgctatgagaacctataactaatggcagtgatccagtcatctctctgagcgggtgctgaagcggtcggatatctatcttacgggattgcaaaggaagctccgactatgttgatttcagtgcaggcgctaagagcgttggctgcgtgggtggtggttggacatcacttcattcaggtgtttttcaactttgaagtggatacgcctatggcgtatctgttcgccgacaaaggcgccgttggtgtagacgtgttctttgtgatcagcggcctggtgattttcctggcgaccgccgacaaggcactgaccccctggcgtttcatcctcatgcgtttggcaaggatcacgccagcgtactggttctataccctgctcatggctttgttgctgttggctgtgccgtcgctgtttgcagaaacccacctcgagacgagtcatctgcttctgtcgctgctgttcattcctgctcagaacccaggggggtttggcgtctatccgctggtggacgtcgggtggaccctgaatttcgagatgctgttctatctactgttcgcctttgccttgctagtgcggcggtcatatcggttatgggtagtggcagcgctgctgtacttggcgtgttacctcatcacgccggccttgaattgggccgacggcttttaccggaatgacatcgtcttcgaattcctgatgggcatcatgatcggcatgctctactgctgcggggcgtgccggaccccaccatggctgccggtgctgggtatcgtggtggcctcagcggcgatttatcacggggcggatttgcctcgtgcgctggagtggggagtgcccagcgcggtattggtcatcagttttgtggcgttggaaccatactttcacggatcacgattgttgaagctgctgggtgactgctcttactcggtgtatttgctccacacgatggtgctgtgcgtcgggcgatggttcgctgagcgcaacggaattgatccctatgcgatgttgcccgtttgcctcgtgatgacagcagtgtgtgcatttttcagctaccaatggctggagaaaagcacctatctctggcttaagcgttggtttggcatggaggatccggcaatcctttcccgacaaaaatactaggactttgtacctgcgtaatattttggcgtaaactgccggcaagcctgtgaggagtttccatgactgccataaccattaccgacgccgcccacgattacctggccgacctgctgtccaagcagaacaccccgggtatcggtatacgcgtctttatcacccagcccggcacccagtatgccgagacttgcattgcctactgcaagcccggcgaagagaagcctgaagacaccgccctggggctgaaaagcttcaccgcgtacatcgacgccttcagcgaagccttcctggatgacgccgtggtcgattacgccaccgatcgcatgggcggccaattgaccatcaaggcgccgaacgccaaggtgccgaacgtcaacgccgacagcccggtcaacgagcgtatcaactactacctgcagaccgagatcaacccgggtctggccagccacggcggccaggtcagcctgatcgacgtggttgaagacggcatcgccgtgctcaagttcggtggcggctgccagggttgtggccaggcggacgtgaccttgcgtgagggcatcgagcgcaccctgctcgagcgtattccggagctcaagggcgtacgtgacgtgaccgaccatacgcagaaagaaaacgcctactactgagtaaggcgttcactgcggacaaaaaaacggcgccccgtgagcgccgttttttatgctttaaattcagtaagttgcaccatttatctaatgtagagtgttcgtcgcgaaaacggcagtccgattttttgtgaatgaatttattaaataaaatcagtagtttatgtttgtcttgtgatgttgagcatcaaggtcgatacagatgcgcatgccccgcccgatacaacgatgactcactgaaactatcactcgccaacacccgacccaccacaatcaacgccgtacgccgaaaccccttggccgctactttttcggcaatgtcgctgagagttccaacaacccaatcctgatccggccacgtcgcccggtgcaccacggtaatcggacaatccgccccgtagtgcggcaccagttcggcgacgatcttgtccaggtggttgacccccagatggatcgccatggtggtgccatgtcgtgccaggctgtcgaagtcctcaccggccggcatgctggttttatccgcatagcgggtcagaatcacgctctgggcgatgtcgggcagggtcagctcggtttccagcagggccgcgcaggcggccaccgccgtgacgccaggaatgatctggaacgggatgcccagctcgcgcaaatggcggatctgctcgccaatcgcgccatacaggctggggtcgccggaatgcacgcgcgccacatcctggcccttggcatgggcggccctgatcaggtcgatgatctgttccaggtgcaattcggcgctgttgaccactgtttccgcctgatgaccttccagtaccgccgccggcaccagcgagccggcatagatgatcgcctggcaactgcggatcagccgctggcccttgacggtgatcaattccgggtcgccggggcctgcgccgatgaagtaaacggtcatgggaaatcctgatgaaaaacgggtgagcatgaaatctgctcatgatcggaagcggcgattatcgggttttcagtcggcgcacgccaatgcaaaggtggcctgggcggttttctggcgggtgatcagcaggcgcgcaggggcgttggcgaggtgttcggccagggccagggcggcgctttcggcgatgccgtaacagccggtgtgggcaaaagccacgtccgattgatggctcaagcggtctgcataaatcgccagttgttcagcgttgaagcactgcaacggcagattcagcagcgcggccaaggccagcagcccgggttcttcctgtttgtgatcgatgctggccagcgcactgacgcggtggcgctcgataccgccctcgatgagggcagcatcaaacagggccagcagggtgtgaacatcacaaccccgctggcagcccatgccgactaccagtttcacgccgagtattgatcgtcacggttgcggcggaacagccaggcgctgatcaggcccaaggccagccagaacgccacgttggtcaactgtgatgcgatcttgaactgcgcttccagcgcctccgggaccagcatcgaatgcacttccggttgtggcgcgccgatcacgtgcggcactacgaggatcgcggcgcccagcgccttgagcagccagttgcgaccgaacacgatcagtgcgataccggctgcggtagacgcggcagtaccgatccaccagatctgccgttgtgccaggtcagcggcggcggtgcccggcagttcgggcggcaggcccagggtcggcgccaatacaaaggtcgcataacccgccaggccccagagcaagccttgagaggtacgggtcggtgcacgcagggtgtacagaccggccagcatcaacgcgaagccaacggcgaccaccaggttgccgcctgtggtggacagcacgcgctgccagccgtcttccggctcccaggcttcggcgtcgtgggtgtgagcagccgcaccttcggcgtgctcgtgcaactcggtcgctgccggggctttttcaaaggtttccgcctgcagaatcagcggggcgacccagaagctttgcagcagggtcagcagcagggcagccagaaggccggtgaaacctgcggtttgcgcaatacgcttgatcatgtcggcaggtctcagtggcacgggaacgcggcgctgtggcgggtatcgtgggcagcgttgtgtactgcctcgatgtgcgagaaaccggcgaagtacaccaggcacgcaccgaggatcgacgcaccgatggcggcggtcaggcgttggctcagggtagaggtgctgctggcggagtgcgaagtgctgctgatgatcgacatggcgcgtccctttcaggtgtcagggtgaaacgagcgcatgaaaaccccgcgagccaggcacgcagggttctgaacagcgcccgcccaccgcgggtttgttatctgattttttcgggccggtctccgggcttgcgaggggctcaatgcctgaaaacgtcgccttcccatgccgcctggcacagtggatatgacgtttcgctcgcttaccgttgcgggggcagcaccggactgtcatgtgtgtgcatgagtcaccggtttcccgtttcaccctttgcagggcacccgaaacaagatgtgtaggagagcatgggggtgggaggggagtcaattggggatgtgttttctgggggcatatccgttgctgcggtaacggcggcttagggttccgcccttacggcggcccacgtattcaagcctgcgttcggccagcgtgtttgacggggcgaccccagatcaaaagcaagagcgcggcggccttagagccgaccggattgtatggctggtactcggtcaaagtgtgggagggggcttgcccccaatggcagtgggtcagtcactgatgagttggctgatacaccgccatcgggggcaagccccctcccacagtttgatcttcatgtatcagttgaagggtggtttgctctggctctagatctgcttttgattttgatctagggcggccccccaaatcactgtcggattacgggcataccgagcctaggcgaggtaccgagtgttggggtaagagcgttttgcttacttttgactgggccggcattccggcttttcaaaagtgagccgctgtaagagcggaaccaatagcggccgttaccgcagcaacggatatgtacacaggccaaccaaccccatcattgaccatcccccaagcactgcgtagccttgcaccctcgaggttcttcggcccaggccgaagctaagaagggaacgcggtccaagccgcggctgcccccgcaactgtaaagggtccagctgactgccacgccactgccgacaaggcgggaaggcgcagccagcgccggtcgcaagaccggcaagccccaagccaggagacctgcctcgcaaccgattttctacttcaaccgggcggggtgatccggtgacgaaatccgctgctgcgcaccgtcgcagggccatcgtcccgtatgcccgcccccaagggcatccgatgaaaacactggccaaactccccgtcaccatcgtcactggcttcctcggctcgggcaagaccaccttgctgcgccatatgctcgacaacgcccagggccgtcgcatcgcggtgatcgtcaatgaattcggcgagctgggcattgacggtgaaatcctcaagcagtgctccatcggctgcaccgaggaagaagccaacggtcgtgtctacgaattggccaatggctgcctgtgctgcaccgtgcaggaagaattcttcccggtaatgcgcgaattggtcgcccgtcgcggcgatctcgaccatatcctcattgaaacgtccggcctggcattgcccaagccgttggtacaagccttccagtggccggaaatccgcagcgcctgcaccgttgacgctgtgatcaccgtggtcgacagcccggctgtggccgccggtaccttcgccgcattcccggaccaggtggacgcccagcgcaagctcgaccccaacctggaccacgaatcgccactgcacgagctgttcgccgaccaactggccagtgccgacctagtgatccttaacaagaccgacctgatcagcgccgaagacctggcccgcgtgcgcctggaagtcgccgaagagctgccgccggcggtgaagatcgtcgaagccagcagcggtcgcttgcccctggatgtactgatcggcctgggcgccggttccgaagagcacatcgacggccgccacagccaccacgatcaccaccacgaaggtgaagacgaccacgaccacgatgcctttgactcgatctccatcgacttgccgcaagccgatgaagcactgctgctcgatgccctgacgcaactggtggtgcaacacggcatcctgcgcgtcaaaggtttcgccgccatcccgaacaaaccgatgcgcctgctgatccagggtgtgggcacgcggttcgacaaacacttcgaccgtgcctggggcgctgaagaagcgcgcaccacgcgcctggtgctgatcggccaggaactggacgcggcgggcctcgaagcgcaactgcgcgccgccctcagcgtctgacccatgcacctgctcaggacccagcccggtggtttcgtctcggacgataatattgccgaccttggccaaagccccgctgacctggtgatcctgtgcagcggcgattccagcctggcgctgctggccgaagcggcccagcagttgcccgacgactacccaagcctgcgcctggccaacccgatgcaggtgcagaaccatgcctcggtcgacctgtacgttgatgaagtgctgcgccacgccaaggtcatcttgatttcgctgcatggcggtatcggttactggcgctacggcatcgagcgcctggtggaactggccgaacgcggtgtgcaactgatcctggtaccgggggatgatcgcccggacccggaactcagcgggctgagcaccgtcggtgccgaagaacgtgatcggctgtggcacttcctgcgtcagggcggcctgggcaatgccctggatttctatcgctgcctggccagcgcttacctgggtcgcgactatgcctggggcgagccgcaaaccctgccacgcacggcgatctatcatccgcagcatgccaacgcccgcctgaacgattggcaggcagactggaacgccgactggccggtggcggcggtgttgttctaccgctcccatttgcaggcggccaataccggttttatcgatgtgttttgccagcgtctgcaggcggcgggcctcaacccgttgcccatggcggtggccagtttgaaagaacccggctgcctggcggtggtcgaggacctgctggatgaggtcggcgcggcggtgatcttgaacaccaccggcttcgcccaatccagccccgaagcgccgcacctgcgcccgtttcgccgcaatatcccggtgatccaggccatttgtgcccaggataaccagcccggctgggaggccagcgagcagggccttggcccccgcgacctggcgatgcacatcgcgttgccggagttggacgggcgcatcatcagccgaccgatcagtttcaaggacctggcctggcgcagtgagcgcagccagtcggatgtggtgtgctaccgcgccgcgcccgaacgcatggattttgtcgctgagctggcgcggcgttgggtcgaattggcgcgagtgccgaatgcagagaaacgcattgcgctgatcctcgccaactacccgacccgcgacggtcgcattggcaacggcgtgggcctggatacaccggcggcggcgctgaatatcctgcgtgccctgaaaaccgaaggctatccgctgccggacttattgcccgacagcggcacggcgttgatccatgagttgctcggcggcgtcaccaatgacctggacagcctcgacctacgcccttgccatcaaagcctgggcctggacgagtacgagacgatgttccagcgcctgcccgaagccaatcgccaggcggtgctggaacgctggggcgcgccgcagaacgatccgatgtgccgcgacggtcgcctgatgatcgccggcctgcgcctgggcttgacgtttgtcggcatccagcccgcgcggggttaccaagtggacgccagcgccgtgtaccacgacccggacctggtaccgccccacgcttacctggcgttctacttctggctgcgccacacctacggcgcccacggcgtgatccatgtgggcaagcacggcaacctggagtggctgccgggcaagggcgtgggcctgtcggaaaactgctggcccgatgcgttgctggggccgctgccgaatatatatccgtttattgtcaatgacccgggcgagggcgcccaggccaagcggcgcacccaggcagtcatcatcgaccacctgatgccgccgctgacccgtgccgaaacctacggcccgctgcgtaacctggagctgctggcggacgaatattacgaagcgcagttgctcgatccgcgccgcgccctggagctgcagaaggacattctcaagctggtgcgcgaaacccgcatcgaccaggagcttgagctggagagcgacgccgatgctgccgtgtggttgccgcgcctggacacctacctgtgcgacttgaaggaatcgcagatccgcgacggcctgcatatttttggcgagtcacccgagggtcgcctgcgtatcgacaccttgctggcgctgctgcgcatcccgcgtggcgatggtcgaggcccgcagtcgagcttgctgcgcgtgttggccaaggccttcgagctgggcttcgacccgctggactgcgccctggccgaaccctggaccggacgccggccgctggtgctgcagaatatcgatgggcagttgtggcgcaccgccggtgatacccgcgagcgcctggagctgtacgccgcacgtttgatcgagcaagccctggaaggaccgcttgaacagctggaggaacccggctgggaagacgtgaaggccgtgatcgaaagcctgcgtattgtcgtggcgcctcggctggatgcctgtggcccggcggaaatgcgcggattgctggatgccttgagcggccgtttcgtgcccgctggccccagtggtgcgccgagtcgcgggcgtttggatgtgttgcccaccgggcgtaactttttcaccgtggatgtgcgcaacctgcccaccaccacggcctggcgcatcggtttccagtcggccaacctgattctggagcggcacctgcaagaccatggcgaccacctgcgccaactcggcctgtcggtatggggcaccgcgaccatgcgcaccggcggcgatgacatcgcccaggcgatggcgctgatgggcgtgcgtccggtgtgggcgacgggcagccagcgggtggatgactttgaaatcctgccgatcagcctgctcgaccgcccgcgggttgatgtgacgttgcgcgtgtccggtttcttccgggatgcctttgccaacctgatccgcctgttcgatgcggcggtgcaggcggtggctgcgctggacgaaccggacgatctgaaccccctggccgccaaggtgcgcagtgagcgtgaagcgttgctggcttcgggcctggacgcagaggccgcggcaaaacaggccggctggcgcatctttggtgccaagcccggcgcctacggtgcgggcgtgcagggcgcgatcgacgggcgtctctggcaaagccgtgaagacttggccgaggtttacctgaactggggcggctacgcctatggcggttccgacgaaggtactgccgcccgcgggcaattcgcccagcgcctgagccaggtgcaggccgttttgcagaaccaggacaaccgcgagcacgacctgctcgattccaacgattactaccaattccagggtggcatgctcgctgccgtggaaaccctgagcggcgacaaggccgccagctaccatggcgaccatagccagcctgacctgccgaagatccgcacgttgaaggaagagctgaaccgggtgatccgttcccgtgcagccaaccccaagtggatcgaaggcgtgaagcgccatggctataaaggtgcgtttgaaatggccgcgacggtggacaatctgttcgccttcgacgccaccaccgcactgatcgacgatcaccaatacgcactgttggccgacgcctacttgctcgaccccgacacccgggcctttgtgcaacagcacaaccccgatgcactgcgcgacatgaccgagcgcatgctggaagcccagcagcgtggcatgtggcaggaaccgggggcataccgcgaggcgttggaaaacctgttgctggatatagaagaagacagctgatgactgatattccccatttcccgctgtccgccgtggtcggcgccgatgacctgaaactggcgctgtgcctgaccgctatcgacccgaagattggcggtgtgctgatcgaaggcccgcgcggcatggccaagtccaccctggcgcggggtttggccgacctgctggccagtggtcagttcgtgaccttgccgttgggcgccactgaagagcgcctggtcggcacgctggacctggacgccgcattgggcgaaggccgggcccagttctcccctggcgtgttggccaaggctgacggcggcgtgctgtacgtcgatgaagtcaatttgctgcccgaccatctggtagacctgctgctggacgtggccgccagcggcaccaacctgatcgagcgcgacggcatttcccatcgccattcggcgcgcttcgtgctgatcggcaccatgaacccggaagagggcgagttgcgtccgcagttgctcgaccgcttcggtttcaacgtggccttgagcgggcagaccttgccggccgagcgtgggcagatcatccggcggcgtctggatttcgacagcgaccctgcggcgttctgcacgcagtgggaggtgtcacaagcggcattgcgcgagcgctgcacccaggcacgggcgcggctcgacagcattgcgctggatgaccaggcgctggcgcagatcaccgaacgctgctttgcggcgggggttgatggcctgcgtgcggaccttgtctggttgcgcggtgcgagggcccatgccgcgtggcggggagccagcgccatcgccgaggaagatattcaagcggttgccgaattcgccctgcgccatcgccgccaggaacagtccccaccggccagcccgccaagcgaagggcagtcgccgaaaccctccgacacctcgtccggtcaaggccaatggggcgatatgcccgcaccggcgctgcccacgggcgcacgccgggaagtgccgacctggccaaaaaagccctaggcattcgccctcgacctgacgcgggggcggatgcgcgacccaaggcagggcgactaggcaacggcaggcaaggcaaggcacgcaacgcgaagcagggcgcgatcaactggccgggcaccttgctcggtggtcggccacaaacgcgacaggacttgctgtttcacctgcgcagtcgtgcggcccatgaactgtggttggtgattgtcgatgcgtcggcgtccacccgacggcatcgagcactcaccgacgccaagggtttgttggcgcagttgtttgatgacgcctaccgccagcgggcacggatggcgttgttgacggccagcgggcaaatgccgaagtggcaggtgcaagggttgaaagcggccaagggcttggcgggttggctggaacagttgggcgcgggcggcggtacgccattgctggcggcgcttgtcgaggccggcaattggctggcattgcggcgcaagcgctacccggctgaacaacagcggttactggtgatcactgacgggcgactcaaggaagttactgggctaccgcagttggagtgcccgggcctgctggtcgatatcgagcgtgggccgatcaggttgggtcgcgcgcagcaactggcggcagggttgcagttggagtatcggcatatcgatcagctgtagtgcctgggcaactgctatcgggggcaagccccctcccacaggggaatgcatttcaaatgtgggagggggcttgcccccgatgaggccctgaaattcacgacaaaacctcagccagcccccggcacattcggccaaagattggccaccagaaacaaccgctcggcttcctcccaatcctcacccacctgtaccagccgcaccagcagttgcgccggagccatcgggtcaaggtcggccagccagccgtgcatctgctcttcgctccacacctcattcgcggggtaatgcgccggcgccagccaggcatgccggggcaggggctgccaatggcccggttggctgcggctgacaaacgcttgccagtcccgttgatgcaaccaacgcccgcgcaaatgctgcggatgggcgccactggggggcatggcctggccgggccaggggtagagcaggtaaccgcccaaccacaaatgcgcatcaaactgctggacatccaacgcggccagcacttcacggctttcctcccgcgcggatatcggcaattgatgttgggccagatgcgccaacttgcggtccagtcggtcatgacaacccggccccagccactgtgcggtgtcctgaccttcaccgtcctgcggccccagatacagcttgatcgccagttccaggtgatgcacgccatcgcggtcacgcagcagcatatccagctcgccgagggtatgcccggcacggcggatcggcaggttggcggccagcaattccacgcccggcgcatgttgcacggcgaactgccacaggcgttcgtaatacaggcccaggcggcgcgtgcgcgacaggctcaaccattgctgcaaggcgctgctgtcctggtccagctggcgcagccagcgttccaacagatgcggcgcctgcacccaatcgctgccggccagcgggtggcgttgcggccacggcgtctgcgcgagcatcggcggggcgagcatcacccacgccaggtcgcgcacctcggggtggcgcagctggcggggcaggttgtgcagatcggggaacacagtcatggtccgagcatagccttttaactgcgctgaaggtggctgagaaccgttgtcatcaaggcttcacggcgacaaaggattttgcctgagacggcctttcgcccataatcgttcttttttgccacactccacatcccgcaggagccccatggagcaatttcgcaatatcggcattatcggtcgcctgggcagtacccaggtgttggacaccgtccgccggctgaaaaaattcctgctggaccgccacctgcatgtgatcctcgaagacaccatcgctgaaatcctgccgggccatggcctgcagacctcgtcgcgcaagatgctcggcgaagtctgcgacatggtcatcgtggtcggcggcgacggcagcctgctcggcgcggcccgtgcgctggcgcggcataacgtgccggtgctggggatcaaccggggcagcctggggttcctcactgatatccgccccgatgagctggaagtcgaagtggccaaggtgctcgacggccattacctggtggagaaccgcttcctgttgcaagccgaagtacgccgccatggcgaggccatcggccagggcgatgcgctcaatgacgtggtgctgcaccccggcaagtcgacgcggatgatcgagtttgagctgtatatcgacggccagttcgtgtgcagccagaaggccgacggcctgatcgtcgccacgcccacgggttccaccgcctacgcgctgtcggcgggtggcccgatcatgcatcccaagctggatgccattgtgatcgtgccgatgtacccccatatgttgtcgagcaggccgattgtggtcgacggcaacagtgagctgaaaatcgtggtgtccaaagacatgcagatctacccgcaggtgtcgtgtgacgggcagaaccatttcacctgcgcccccggtgacaccatcaccgtgagcaagaaggcacagaagttgcggttgatccacccgctggaccacaactactacgaagtgtgccgcaccaagctgggctggggcagccgcttggggggtggaggcgactgatgctcgatcccgcgcgtagctacgacctgattggtgacgtgcacggttgcgcccacacccttgagcacttgctcgacctgttgggctaccacaagcagggcggcacctggcgccatcccacgcgtatggcggtgttcctcggcgatatcatcgaccgtggcccgcgcatccgcgaggcgctgcatatcgtccacgacatggccgaggccggccatgcgctgtgcatcatgggcaaccacgagttcaacgccctgggctggaccacaccggcaccgccgggcagtggcaagcagttcgtgcgcgagcacaacccacggcatgcgcggttgatccacgagaccctgacccagttcgaacatcacccggccgactggcacgacttcctcggctggttctacgacatgccgctgtttgtcgacgccgggcgttttcgcgtggtgcatgcgtgctgggacgatggctttatccagccgctgcgtgccaccttcccggacggctgcatcgaccagcacttcctgcaggccgcggccgtgccgggcagttttgcctgcaacgccttcgaccgcctgctgcgcggcaccgacatgcgtttgccggacggcctcacgttgaccggtggcgatggcctgacgcgctcgttcttccgcaccaagttctgggaagacgaccccaagacctacggcgatatcgtgttccagcctgacgcactgcccgagccggtggcgcgtacaccgttgtcgtccaccgaaaagaattccctgctgcgctacggcgtcgacgaaccgctgttgttcgtcgggcattactggcgcagcggcaaaccggcgccgatccgcccgaacctggcctgcctggactacagcgcggtgctgtacggcaagctggtggcgtaccgtctggaccaggaaacccgcctcgacccgcgcaagttcgtgtgggtcgatgtcgagcgaccggaggtgctcacatgagcccctgcgcgctgcacatgcactcttgaggaacctccatggatgattcgacgttcgaccaactggaggctgcgctggctgcggctcccggtaacgtcgcactgctgaccgtgttgctgggcgccagccttgagcgtggcgaacacgcgcgtgggctgaagctgctgcccgccgaccttgagcaatggccagaggcttcggcgctgaagctggcggcggcgcaattgctgctggccgacggccaggcgcagaaggcgttgttgttgatcgagggtgaagacccgacggcgcgcctgctcaaggcccgtgccctggctgcactcgagcgtctcaaggaagcccaggtggaataccgcgcagcggtggacgccaacccggcgctggaagacatggcgctgtggcgccgcctgaatgtgtcggtggtggacttccctggcgccgaaggccgcccgcgcctgcgtgtgatctccaatgacgacaccgacaagagcgaagtcgtgcgcctgctggtgccggaaaacgaaaccctgaccttcgatgatatcggcggcctggatgagttgaaaaagaccatccacaaaaagatcatcctgccgtaccagaaaccgggcctgttccagcgctttcgcaagaaagtcggcggcggggtgctgctgtatggaccaccgggttgcggcaagaccatgctcgcccgcgccacggccggggagtgcaaggccaccttctttaacgtggcgatttccgatgtgctggacatgtacatcggcgaatccgagcgcaagttgcacgcgctgttcgagcaggcacgggcccaggcgccggcggtgatgtttttcgatgaagtcgaggcgctgggcggcaaacgtgcgaatacccgcgagtcgacctcgtccaagctggtgagccagttcctctccgagatggacggttttaccaatgacaaccacggcgtgctgatcctcgccgcgaccaacgtgccctggtcggtcgactcggcgttccgccgccccggccgctttgaccgcgtgctgtttgtaccgccaccggatcgcccggcgcgtgaggcgatgctcaaggcgatgatgaaaggccgcccgatggcagacgacatcgacttcgccttcctggccaagaacacctcgggcttctccggtgccgacctcagcgagttggtggaaaccgccgccgatgaagccattgaagcgtccatcgacagtggcgccgagcagtcgatttgcgaccggcatttcaagcaagccttgaaagaggtgcgcgccaccaccctggaatggctgaccacggcgcgcaattacgcgcggtatgccaatgaaggcaaccagtacgatgaagtgctggctttcctcgacaagcacgggaagggtcgctgatggcgcagtacggtggttatcgcatcgaagacgaaccgcgcccgggcgctctggccaagtgggcggtttcgccattctggccgctgctcggcctgatgctcggtggcgcctggctgggtttgccgtggttcgtgttcaactccattgccgtcggcagcccgacgcgggtgcgcgaatgggtgctggccggcgtggcgctggtgggcagcatcgtcatcggcttcgtgttgctgcaactggttggcgcggggtatttgcagacccaggcgcaaatccagtacgccttgctggtgttggtggtgtggaaactcaccctgggctacctgctgtatatgcagcagaacgcaaccattgagatttaccagtactacggcggcgagttgagccgttttggttttcccttggcgttgattggtggcttcgtgctcaaaggcatggtcgtcaaatggctgccgtacaccctgtggtacctggtggtgagctgatgaataccgactatctgctgcaactggcttaccaacgcctacaggctgaccacaatgatggcgccatcgacgcactgcgccagttgctggccagcgacccgcactcggccgaggcgcatgccttgctggcgatctgcttgatgaatatgcgtcgcgtgcatgctgccaagcgcgaggtgcagttggcgcttgccgccgatgcgcagttgccgctgtcccactacgccgccgcgcaggtggcgattgccctgcgcaagttcaagctggcccaggaacatgtcacccagctgttggacatggagccgctgaacccggcgtactaccgttgccaggccgagttgtaccagctcaccggtcgcctagcgcaaagccgtgaaccgctggaaaaagccttgcaactgggccccgatgatcccgccaacctggtagccatggcgcagttccaccgcgccagcagccagtgggaccaggcgtatcagttcgcgcgccaggcgttgcaggctgatccgtcgaatgcggcggcagtggtggtgctcggccacctgttgttgcgcgaaggcgatatcaacggcgcccgtgaccatgcgatctgggccttgcaggagaacgccacgaacgttgcggcgctgcacctgctcacggcggtcaaggcccgcagcaatgtgttcctcggcacctggtggcgcttcaatagctggatgaacgagcgcagcgccacccgcgccattatcctgctgctgtgcatgtttgtggtctaccgtgttgtggttatcacgttgactgcccagggctatccgcaagtggccgagctgatcaattggctgtggctggcgtttgccgcctacaccttcgccgcgccgcagatcttccggcgccttttggacaaggagcttgtacaggtcaagctctccaaggaattctgacgggccaggacccgtcacccacgtactcgctgaacctcagaggctgttcacatgtcgtcttttgctgaaatgatcgaaaacatcaccccggacatctacgagagcctcaagctcgccgtggaaatcggcaagtggtccgatggccgcaagctcaccgccgagcagcgcgagctgtcgttgcaggcggtgatcgcctgggaaatccagaacctgccggaagaccagcgcaccggctacatgggcccgcaggaatgccagtcgaaatcgaccaccgtgccgaacatcctgttcaagtcggatgcgatccattgattgaaatcggtcgcggtgcagtcagcaagatgtcggcgcaactcggtgagccgaccgttcaatacgcgtttcgcttaggaagtgccgaggtgccggtcaatccgttgatcggcacccacgtgcgcctggaatacctcggtgccatccattgcagccattgcggccgcaagaccaagaccagcttcagccaggggtattgctacccgtgcatgacaaagctggcccagtgtgacctgtgcatcatgagccccgagcgttgccattacgacgccggcacctgccgcgatccaggctggggcgagaaattctgcatgaccgaccatgtggtgtacctggcgaactcgtcaggcatcaaggtcggcatcacccgtgccacccagttgccgacacgctggctcgaccagggcgcgagccaggcgctgccgatcatgcgcgtggctacccgccagcagtccggttttgtcgaagacctgttccgcagccaagtggccgacaagaccaactggcgtgcgctgctcaagggcgacgcccagtccgtcgacctcaagcaggtgcgtgaccatctgttcgccgcctgtgctgacggcctgctgggtttgcaggaacgctttggcctgcaggccatccaaccggtcaccgacatcgagccgctcgaaatccgctacccggtggagcagtatccggcgaagatcgtcagcttcaacctggacaagaacccgattgccgaaggcacgctgctggggatcaagggccagtacctgatcttcgataccggcgtgatcaatattcgtaagtacacggcctaccagctcgccgtgcatcagtagaaggatgccacccatgcgcaccgaacaaccgaagatgatttacctcaaggactatcaggcgccggactacctgatcgacgagacccacctgaccttcgagttgttcgaggaccacagcctggtccacgcgcaactggtgatgcgccgcaatcccgagcgcggcgccggtttgccgccgttggtgctggacggccagcagctggagctgttgagcgtgaacctggccgatcaggcactgagcgctgatgactacgagctgaccgacagccacctgacggtgcatccgcaaagcgcgacgtttaccctggataccacggtaaaaatccatccggaaaccaacactgccctggaaggcctgtacaagtccggcagcatgttctgcacccagtgcgaggccgagtgctttcgcaagatcacctattacctcgatcgcccggatgtgatgagcaccttcaccaccacggtgatcgccgagcagcaccgctacccgattctgctgtccaacggcaacccgatcgccagcggtccgggtgaggacggccgccattgggcaacctgggaagatccgttcaagaaaccggcttacctgttcgccctggtggccggcgacctgtggtgtgtcgaagataccttcaccaccatgaccgaccgcaccgtggcgctgcgcatctacgtcgagccggaaaacatcgacaagtgccagcacgccatgaccagcctgaaaaagtccatgcgctgggacgaagaaacctatggccgtgagtacgacctcgacatcttcatgatcgtcgcggtgaacgatttcaacatgggcgccatggaaaacaagggcctcaacatcttcaactccagcgccgtgctggcccgcgccgaaaccgccaccgacgccgcgcaccagcgggtcgaggcgatcgttgcccatgaatacttccacaactggtcgggcaaccgcgtgacctgccgcgactggttccagctgtcgctcaaggaaggcttcaccgtttaccgtgactcgcaattctccgccgacatgaactcggccacggtcaagcgtatccaggacgtggcgtacctgcgtacccatcagttcgccgaagacgccggtccgatggcccacgcggtgcgtccggacagctttatcgagatctccaacttctacaccctgaccgtgtacgaaaagggctcggaagtggttggcatgatccacaccttgctcggcgccgaaggcttccgcaaaggcagcgacctgtacttcgaacgccatgacggccaggccgtgacctgcgacgacttcatcaaggccatggaagacgccaacggcgccgacctgacccagttcaagcgctggtacagccaggccggtacgccgcgcctggcggtgagcgaggcctacgacgccgcggcgaaaacctacagcctgaccttccgccagagctgcccgcaaaccccggacaaggtggaaaaactgccgttcgtaattccggtggagctgggcttgctggacgggaagggcgctggcattgccttgcgcctggccggtgaggcggctgcgggtggcacgtcgcgggtgatttcggtgaccgaggccgagcagacgtttaccttcgtcgatgtgcctgagcagccattgccttcgctgctgcgcgggttctcggcgccggtgaagctgagcttcccgtacagccgcgaccagttgatgttcctgatgcagcacgacagcgacggtttcaaccgttgggatgccggccagcagttgtcggtgcaggtgttgcaggagcttattggccagcatcagcaaggccaggccttgaagatggatcagcgcttgatcactgcgctgcgcagcgtgttgagtgatgaaagcctagaccaggcgatggtggcggaaatgctgtcgttaccgggtgaagcctacctgactgaaatcagcgaagtggcggatgtggatgccatccacgccgcccgtgagtttgcgcgcaagcaactggcggacaacctgcacgaagcgttgtggctgcgttaccagtccaatcgcgagctgtccaaacaaacgccgtacgtggcggccgccgagcactttgcccgtcgcgcgttgcagaacatcgcgctgtcgtacctgatgctcagtggcaagccgcaagtgttggccgcgacgctggaccagttcgacaccagcgacaacatgaccgagcgcctgaccgcgctggcggtgctggtgaattcgccgttcgaggcagagaaggccaaggcgcttgcggtgtttgccgagaacttcaaggacaacccgctggtcatggaccagtggttcagcgtgcaggctggcagcacgttgccgggcgggctggcgcgggtcaaggcgttgatggagcacccggcgttcacactcaagaacccgaacaaggtgcgtgccttgatcggtgcctttgccgggcagaacctgatcaacttccacgcggcggatggctcgggctatcgtttcctggcggacttggtgatccagttgaatggcttcaacccgcagatcgcttcacgccagttggcgccgctgacccgctggcgtaaatacgacagcgcgcgccaggcgctgatgaaagccgaactggagcggattctggcgtccggtggtttgtcgagtgatgtgtttgaggtggtcagcaagagtcttgcctgagttgcatcgttgaataaaaaacggcctgttgaacaggccgttttttttgcctcagataaccggtggtcgcgcggtgtcgaggccgttatcgatggggaagcgctctgcgatgatcccgtgcggcacgccaagcgggatggcgctggcgctgtcgagacgggtgacgtgatcggccgacagttgcacattcaacgcgccaagggtgctgtccagctgggcgcgggtgcgcgaacccaggatcggcaccagcgcggtggtcgagcgccgggccttttcccgcagccaggcgatggcgacgtgggtcggcgtggcgtcgatttcaccagcgaccgccagcaacgcgtcgagcacggcggtttcacgcgcactgtgttcggcgtgcaccaggatcccgagtttgttggcgcggttgtcgtcctgggtgttgcggtacttgccggtcaggaaaccgccgcccaggggggaccacagcgtggcgcccagccccagcgcttcggccattggcagcaactcgcggtcggcgctgcgttccaccaggctgtattccacctggacgccgatgatcggtgcgaagctgcgcacgtcggccagcaggtcggcgcgggcaatgcgccaggcggggaagttggacaggccggcatagtggatcttgccggcgcgtaccaggtcatcgaggccgcgcaggatctcttccatgggcgtgacgttgtcgctcatatgtgcccagagcaggtcgatgcgctcggtgttcaggcgcttgaggctttcttccaccgagcgcatcaggttcttgcggttgttgccgacgcggatcgtgccttcatcggacggctcggtgcgcagggtgtacttggtggctaccaccaggttgtcacgttccgaggcgataaattcccccagcagcttttcggcctggccgaactggtaaccgttggcggtatcgaggaagttgcccccggcttcgaggtaaccatcaaagatcgccttggcttcgtcgcgctcggcgccatggccccaacccgtaccgaaattaccggtgcccaaggccagttcagatacctgcaggccgctgcggcggccaaagattttattacgcatacaaggactccagaggcagtgattgtcttacatgtttggtaacatgtatttaatatgatatgcataatttatcgggtcaagcgacttttttactgctgacgatttctgacagggggctttgctatgctgctgcacttttccattttctggcgggaaaccctgtgtcgcgtaccactcgtctactgactttgctccaggccctgcggggcaagaagcgtccggtgaccgctgccgtgctggcggcgcagttggaggtgtccgagcgcacgctgtatcgcgatatcgccgaattgacggccttgggcgcgccgatttttggtgaggcgggggtagggtatgtgttgcgcagtggcttgtttctgccgcccttgatgctgaacgccgaggaaaccgaagctatcgtgctcggcttgagatatgtggaccagcgcggcgatgacgtgctcagccgcgctgccgccaatgccctggcgaagatcgccgatgtactcgaccctgccgcccaggaagccttgcgcaacccgacgctgctgccggggccgcccggcttcggttacccggaaaaccgtgtgccgctcaacgtgtttcgcggggccattcgcaaccaggccaagctgcagatcgattacgccgacgccagccagacccagagccaacgcctgatctggcccctggccctgggctttctgaatgaagtacgggtgatcgtggcctggtgtgaattgcggggggcctatcgcacctttcgcaccgaccgcgtggcgagtgcacaggtgcttggcgaacgttacccggggcggcgcagcgattggctgcgggcctggcgcaagttgatggaacagaacgaatccgggccgtttactcctgacaaaaactgacacaaccctggcttagcatggcactacaaatcacccagaaaggagctgtgtcatgtctatccctgagttggcaccggccatcgtggcctatatcgcggcggccaatacccgtgacacctcggctatcgcccagtgttttgccgaggatgccaatgtgttcgatgagggccagcaccaggtcggcgctgccgccattgcgcgctggatggaagacaccgggcgtcgttaccagccgcgggtcgaagtgctcaaggtgcaacaccgtaccggcaaggtgctggtcagcaatatcgtgtccggcaatttcccgggcagcccattggagctgcgctacacctttcgcttgaacgagcagggcaagatttcgcggctggatatttcgctgtagttcatactggcgggcatgactttcgactcgcccctcgctgcctaccaatacgccgttgctcaaccgggtttcgtcgccgacgccgctcagcgccgcgcggtggacgccctgcaagcctgccacgaagccctgcaccacagccatgcaccgatcaccggcgtgtacctgtggggcccggtgggtcggggcaagacctggctgatggaccagttctaccaaagcctgcaggtgccagcgcggcgtcagcactttcatcacttcatgcagtgggtgcatcagcgcctgttccaactgaccggcacccacgaccccttgcaggccctggcccgggagctgagccaggcagtacgcgtgctgtgcttcgacgaattgttcgtcaatgacatcggtgacgcgattatcctcgggcggctgtttcaggtgatgttcgatgaaggcgtggtgatggtctgcacctccaaccaaccacctgaccagctgtatgccgagggtttcaaccgcgagcgatttttgccgggcattgcggcgatcaagcaacatatgcaggtggttgcggtggatgggggagaggatcaccggttgcatccgggcgcgggtattcagcgctactgggccaaccaacccgaggtactggcgggcgtgttccagcgcttggcccaaggtcaaccgactcgcagcgggccgctcgtggtggggcaccgcaccatcgtcgccgtgcagtccagcgacacggtgctctggtgtcgttacgccgacctgtgcgaacaaccgctggcggccatggacttcatgctgctgtgcgatcgcttcaaggcgatcctgctcggtgaagtccccaacctcagtgcgcaaaaacggcctggccggattgcccggggcactgaggatggcgtgcaacgtgtagtggccggtgatcgccaattgccggagttgtcggtgcacgatgacagcgtgcgtcggtttatcgccctggtggacgagtgctacgaccgtaaagtgccgttgttcatcgaggcccaggtgcctctggagcgactttataccgagggctacctggagtttcccttccgcaggacactcagccgcctgcaagaaatgcagttgcagcgtttcggctgacgcccgtacgaaaaaatccaggagtcggccggttgcgcgttttcaaccgagtaaccttcgcgctttcgtgcgcatatttgtagttaatctccttcatctggcgcctgctccacgcttacaatcgtgcccctcacagggagccgaatcccttgtaatcgtgatcgaggaaggacatggacaccccagacatcctggtgctgcaagccagctacaccaaccccgtgcatgccgacgccatcggccgcgtgctcaaccattacgccgaagacccgatgggcggtggccacagcctgcccgccgacctcctggagcaactgccaggcgagctggcaaagcggcctcatgcattcagcgtactggcgtttgtaggcggtgagccagcgggtctggtcaattgttttgaagggttttccacgtttgcctgccgtcctttggtcaacgtccacgacgtggcggtgatggaggcgttccgtggtttggggctgagccagaaaatgctgcaaaaggtcgaggaaattgcccgtcagcgtggctgctgcaagatcaccctggaggtgctcgagggtaatgccgtggctcaatcggcatatcgcaagtttggttttgatgattcgaagtttgacccggcccacgggcgcatgttgttctggagcaaaccgctttaataaataacaggcaaaaaaaggcgccattaaatggcgccaagttgaccttaaccaaaggagcgggatggcaaagggtattacggttacatcaagtgtttggttgttgctcggcagcggactggtcagcggtttctttcttcacgttctttccatcggcaagcgcggtttgtgcagcggtgccgtgggtttgttgctgcacgaaggtgaagtcgttgtagaacgccttggaacgctcggagccgccttcggcaaaggcggcggcggaggtcagggtcatcaggctggcaagcatcagggtggagagtttcatggcagtgtttccggtaagtgtgatcggtatccgctctgtccttgatcagattcatggggcgagtgtggagggagtttattaagtaggaattaacgccaaaaaaaccaaaagctaacaatttcgttaacttttggttaaaaggtcctacatcttccagtccaatgccaaggtgatcgagcgtgggtcaccccaatacacgccgttataaaaaccaacgcgctcgtaatactttttatcaaatagattgttgacgtttaacgacgccgtaacatgttcatcgaactgatagcgggacatcaggttgaccacgctgtaggcctgctgagtgatctttgcccgtgtggtgatccggttgcccttgctgtcacgagcccccgttggccggttgctgaattcgtagatatcgctctgccagttcacggcaccgccgaccgtcaggttgcgccatgcaccgggtaaacggtaggcactggagaccttcagcaggttcagcggctggccggtgttgttgcgtttgtgcgtgccattcactgagtgggtataggtgtagccggccgtgagattccagtccggcatcacttcgccggccacctccagctcgaaaccgctcaccttgttacccttgccgcctgacttgtagtactcctcgcccgttttggggttcggcagtacggagtagtcccgttcggcgacgttgtcctgcttgctccagaaataggcggccgctacgttcaagcgctcctgcagcaagctgcccttgagcccgacttcatagttgctgcccaccacgggctccaggtacttctcgttgacgtccttgaggctctgcggcttgaagatgtcggtgtagctggcgtagacggtgtactccggcgtgatgtcgtagagcagcccggcgtagggtgtccacatatcgttgtgggtctggcgggtcttgttggccctgagcaattggtcattggccgtgtattcaggcgccgcgctttccagctcccagctgccataacggctgccgagtaccgcatgcaggcgctcggtcaggctcaggcgcgtggccaggtagccagctttctgttgcttgctgctgtgctcacccttgagcccggtcacggtgtcggcgaacttgccgatcccgcccatgtatttccagtcttcgatgctgtagtagccgccggggatgctgctgcgcatcacgggcgagacgtcccgctgcgtggcctcgccataacccatcatcagttcatgttcacggcccagcagcgcatagctgccagccaggttcaggtcaatcgcctccattctcgacgtgccgcgcatatggctggcccaggcggtcatgccgctgcggtcgtcgttggggaaccccgcaccgccgtagtagaccttgccgtccgtgtcgctctggcgatgggtgtaggccgccttcaagtgccagtcgccattcaggcggtgatcgaggctggcaaaggtggtcttgtcggtcagcggccaggagctccagtgcgctgccatattggtggagcgcgacaacccagccttgccgccctggctgttccagtagggcacagtgccccaggatgtgccctgtacctttttgtcctggtaatcaaaaccgaccgccagcacggtgtcgtccgacaggtcgccttcaaggatgccgtagccgactgcccgctgcagcgcgtagttgtcacggaacgatttgctgtcgcgataggccagcactgtacgcccgcgcagcttgccgtcgtacgccaacgggccgccgacatccacgaagctgtagtagttgtcatggctgccaccgctcaccccggttttcgcctgccactgggcggtggggcgcttgcgcaccatattgaccgtggccgaggggtcacccgcaccagtggtcaagccggtagcgccgcgaaccacctcgatgcggtcgtagatgatggtgtcggaatcggacttcatgtagccgaaggtgttgagcatcccgtcaatctggaagttgttgatgccgtagccacgggaggaataggacacacggtcggagtcgttgtgctggacgttgaccccggtggtctggcgtagcacttcggtcaatgtattgagattgaaatcatccatctgctggcgagtgatcaccgagatcgattgtggggtttccttgaccgaaaggttcagccgtgtggccgtgctcatcgagccggtggtgtaggccccggtgtgctcggtggtggcgcccaggccctcggcggtgatgctggtggcccgcagctcgagggcttggtgttcggggtcggtttcagccagcaggtcggggcttgcgcccacgctgaagaggccgagggtgagcgtcatggaacgggtgaaaggcgcgaacatcgcggaagactccttgtcgtctttgcggcctttccggtcggaaaaggccttggttcaaagacgaaaggacagggggaactttaggcttaaacgagaatgattgttatctttctgttacaaggccggtttttcctgcagcaccacgtcggtcgggttggcctttttcggcttgatcaggctgaagtcgatcaggggcttttgttggcgctcgtaagggttgccaatcatccgcgggcgcggtgtgaagctgtcactcaccaggctttttgtacggtccagttcattgaagctaagaccggccagatcagcccaggtgtgaatcaactgcgagctggagtagggccgttgcaagtcaccggcgaagctccagtcgtgggtttcgcgccatttcggtgaggcataggccatgaacggaatggtgtacatcggcgctgtcggcttgccttcgttacgtcccagggtggtgtggccaatcgagtcgaagacatcttcgccatggtccgacaggtacagcaggaagccgttcggatcggtcttggcgtagtccttgatcaggcttgacaccacgaagtcgttgtacaacaccgcattgtcgtagctgttgtaggtgggtaactggtcgtcgctgatgcccgcgggcacgccctggcggtcggtgaatttgtcgaaggttggcgggtagcggtactggtagctcatgtgggtacccagcaaatgcaccacgatgaacttgcgctcggccggatcggccagggccttggaaaacggcgccagcacgtcgccatcgtattggcgggcgttctggttgcggttgttgttcaggtacacctgctcgtcggcctgttcggaaaaggtcgtgagcatggtgttgcgcttggtcatggtctgctggttggtgatccagtaggtcttgtagccggcctgtttcatcacgctgacgatggacggcgtcttcaggtacaggtcggggttttcttcgtcggcgaaggtcagcacctgttgcaacgcctcgatggtgtaggggcgcggggtgatgacgttgtcgaacaccgccagttggtcacgcagtttgtccagctccggcgtggtgttgcgcgggtagccgtagaggctcatgcgctggcggttggtggactcgccgatcaccagcaccagggtcgacggttggccggccatggtgtccttgaggttggtcaggggcgggatctggctggcgctgtcgagcatgccttgcatgttgtccagttgctcggtgtagcggcggtaggcgacgatcatctgccacggcacggccggttcgatacgggtttcaaagcgatcgatggcctgttccatgttgtcgctggtggcgatctgcttgaccagcggataacccaccaccgccagcacaatcgctgccgccgccagcatcgactggccgcgaggcaggtagaccgggcgcagccgcgtccacaggaagacggcgaaggcggtatgggcgatgaacgccaacacgatccaccaggcaaaatactgggtggcgtattcgccggcttccgagatgttcgactcgaacatgatgaagatgacgctttgggagaattcctgctggtagatgaagaaataacccaggctggccatggaacacgcccacagcaccacgccgatcaaggcggcgagcagtcgtgtacggcgggggaacagcagcatgggcgcaagccacagtgcactcatgaagaaggcttggcgaaaaccactgaaaccggaagtcccagtcaactggatcagcagttgggtaatgcccgagaagtaccagaaaaacaggaacagccagccaaggccggcccaatcaaagcctttcgcagacgtggtgctgcgtttgaacatcgccatccagcgctccaacccgttgatgtttcagttgacgcgcagtgctgcacgcaacagaagccacccttgcatggggtggcccttgggggctggagtatcgggagaggcatgtgaaaactttgtgagatttttgtagcggttatcttacaaagcgatgacggggctcagcagagcgcgggttgtgcaccggcgggctggtccaattgggcctggatgatatgggcacgcaggcgcaggacttcctgctgcagctgttcgcgctcgtctttcaactggcgcaactcgtcgcgacggatagtgacgtagagggtctgtggcggacgtgtcatctgtgcagtgctcattgcttacctcgcaaatagccggtgtgtcgcggtgtgccagaacgcttgagtcgaggttctcggcagcagtcagggcaattctgaattctttttgcaggcaatggaacttttttatttttgatggtcgtgtgactttttgtgccgtgatgctgaaacgatggcaacttttttccatgaaactagcggtatccgcgctggactaaccctcattagccgcattgcgctataaactatgtcacacattttttagtagttaggagcatcagcacatgcaactggggattatcggactaggccgcatgggcgggaatattgcacggcgcctgatgctcaatgggcataccaccgttgtttacgaccgtaacgaagcatttgtaaaaggcctgagcgaagagggcgccaccggcgtttccgacctcaaggccctggtttccgggctgcaaaagccacgcaccgtgtgggtcatgttgccggcgggcgcgcccaccgaagacaccatcaacgaattgagtacgctgctggaagacggtgatgcaatcatcgacggtggcaacaccaactataaggacgacgtgcgccgggccaaggccctggcggcaaagggcctgcactatgtcgacgtcggcacctcaggcggcgtctggggcctggagcgcggctattgcatgatgatcggtggcgacgccgagaccgtgcagcgccttgaccctatcttcaagagcctggccccgggccttggcaatatcccgcgtaccaaggaccgttccgccagcgccgacccgcgtgccgagcagggttacatccacgcaggccctgccggttccgggcacttcgtgaagatgatccacaatggcatcgagtacgggatgatgcaggcgtttgccgaagggttcgacatcctcaagaccaagaattcggaaaacctgcccgaagaccagcgtttcgacctcaacgtcgctgacatcgccgaagtctggcgccgtggcagtgtggtctcgtcctggctgctggacctgaccgccgacgccctggccaccgacccgaagctcgacggctactcaggctcggtggccgacagtggcgaaggccgctggaccatcgaagccgccttggaacaagccgtgccggtgccagtactgtccacttcgctgttcgcccgcttccgttcgcgccagcagagcacttacggtgacaaaatgctctctgccatgcgcttcggctttggtggtcacgtggagacttccaaaaaatgaccgccaacggcaagaaacccaaggccgaacccgctccgcccaccaccctgtttctgtttggtgcccatggtgatcttgtcaagcgcctgctgatgccggcgctgtacaacctcagccgtgatggcctgctgggcgatggcttgcgcattgtcggcgtggatcacaatgcgatcagcgacgccgacttcgccaagaaactcgaagacttcatccgcaccgaagcggcgagcaaggtcaagggcaatgccgataacgctctcgacccagcgttgtgggcgcaactggccaagggcatcagctacgtcgagggcgacttcctcgacgacagcacctacgccgacatcggccagaagattgccgacagtggcaccggcaacgcggtattctacctggccaccgcgccgcgtttcttcagtgaagtggtgcaacgcctgggcagtgccggcctgctgacggaaaccgacgacagcttccggcgcgtggtcatcgagaagcccttcggctccgacctggccaccgccgaggcgctgaacgccagcctgctcaaggtgatgagcgagaagcagatctaccgtattgaccattacctgggcaaggaaacggtgcagaacatcctgatcagccgtttctccaacgtgctgttcgaggcgttctggaacaaccattacatcgaccacgtgcaaatcaccgccgccgagaccgtcggcgttgaaacccggggcaatttcttcgaaaaaaccggcaccctgcgcgacatggtgcccaaccacctgttccagttgctggcgatggtggccatggagccgcccgcagcctttggtgccgacgccgtacgtggtgaaaaagccaaggtgatcggtgccgtgcggccctggtccctggaggatgcgcgggccaattcggtacgcgggcagtacaccgccggtgaaatcggtggcaagtcactgccgggctaccgtgaagaacccaacgtagcgcctgacagcagcaccgagaccttcgtcgccctgaaggtaatgatcgacaactggcgctgggtcggcgtgccgttctacctgcgcaccggcaagcgcatgagcgtgcgcgacaccgaaatcgtgatctgcttcaagccagcaccctatgcgcagttccgtgacaccgaggtcgacgagctcaagcccacctaccttaaaatccagatccagccgaatgaaggcatgtggttcgatttgctggcgaaaaagcccgggccgaccctggacatggccaatatccagttgggttttgcctacaaggacttcttcgaaatgcagccgtcgaccgggtacgaaaccctgatctacgactgcatgaccggcgaccagaccttgttccagcgtgccgacaacatcgagaacggctggcgtgcggtgcagcccttcctggatgcgtggaaggaagacgacggcatccaggcctacaaggccggtgaagacggcccggctgccgccgacgcgttgctggcccgtgatggccgcacgtggcacagcctcggatgagtgatgcagcgattcaccccatccgttttatcctcagtgacgtggacggcaccttgctgcacccggaccaccacctcagccagcgcaccgccgacgcggtgcgtgcgctgcgtgacgccggggtgtttttcagcctggccagcgggcgtccgcccaaggccatgctgcatctgatcgaaacgttcggtatcgatgtgccggtggcgggcttcaacggcggtacgctgatcaacccggatggcagcatcctggttgcccaccatttgccggcggaagcggcgctggtcaccctggcgctgttttcaggcgagccggacgtggaagtgtgggtgtttgccgacggtgactggctgcgtcgcgatccgcccgggccgatggtgcagcgcgaagctgatggcctgggctacgggccggtggtggtagagagtttcgagccctacctggatcggatcgacaagatcgtcgcggcgagcaacaacacccagcggctggtcgagctggaagcgcagttgcaacccaaggtacaggggctggcacacgtgtcgcgctcacaaccggtttatctggatgtgacggcgatgttggccaacaagggtgaagccctgaagaccctggctgcacacctgggcataccactggagcagaccgcggcgatcggcgatggtggcaatgacccggcgatgtttgaggtggccgggttgtcgattgccatggggcaggcggaggaaaccgtcaagcgtcaagccagtgtggtcaccggcagtaacctcgaggatggcgccgccgaggcgatcgagcggtttatcctggccggctgcaacatacgctagacagttacagcgataaggcaatgcagtacgccaacaatggacgctgaattctgcgccccacacctcggggcgttgactttgccgcatggccttcatgtcaggaggttgccttgcgggtgatggtacgtctgttgattctggagttcgaggtgcgtgaaaagtccacgagccggtcgctgcacggatatcgattaccactttatccgtggacacctcaaacgctatgccgagcgcaacatcggctacgcgaagttaaaggactacgcctctaaccgagaacttctgatcaatgttctgcgctcgaacattgatcacgaagttgccgaaacggtgttctttagcgaagacgtcagctcaacggtgcgctgagttacttcggcatggcccaggcttgcaactgatagccgctcttgtccaactcggcacgcgcctgcaacagcaagtcttcaagttgtgcggggttggaataagtgcgcgcatccagttgccggctgccgatacgggtattggtgcggtcgatgacgctcaggctcagggcgccattgccgtcatgccaggccacgcactgaaagggttggaaagcacggtctgcgatcaaaagagcttcgttgatgcggagcggggcgttcatgtgggtcgtctctctaaatgcccattcaagtgattgccggcggttgggctgaccgtgcggcgggttacttgtactgatgcacgatggcggggtacgggtcacatgttagagcaactattttaaacttttagtgattgacgtcatgtaagcggctgttttgaaagctgaatgaaagtttcggcatagcccaacttttcggcaaaggcgcgcagaagtggctttttgccccgacttatagcgaaacggtacaagcggtgcgtcaagaccttgctagtgttagccgcaggcgtcacaaaccgttgtttctaaataactttaacaattttgacgccaaggaacagtcatgggtgtgccccccgttcaacgtcggttgctagtggttgatccctgtgacgattgccacgacctgctgcccggtttgcgcacggccggctgggcggtcgacagttgcccattggaggcggttggcgagcggtcctgcgatgttggcctgttacgcttgcaaccctcccacttggagcgccccgaagcggtcaaggagttgatcggccgcagcggcaccgagtggattgccgtcctcagcccggatgtactgcgcctgcagaacgtgggtgattttgtctgcgagtggtttttcgacttccacaccttgcccttcgacgtggcccgggtgcaggtcaccctgggccgtgccttcggcatggcgcgcctgcgcggcaagggccacaccctggtggatgagccggagcatgagctgctgggtgacagccgggcaatccgtgagctgcgcaaactactatcaaagctggcgcccaccgaatcaccggtgttgatccgtggtgacagcggcacgggtaaagagctggtggccaagacgttgcatcgtcaatcccagcggcatgccaagccctttgttgcgatcaactgcggggcgatcccggaacacctgatccaatccgagttgttcggccatgaaaagggcgcgtttaccggcgcccatcagcgcaaggtcgggcgcattgaagcggctcacggcggcacgctgttcctggatgagatcggcgatttgccgatggagctgcaagccaacctgctgcgcttccttcaagaaaaacagatcgagcgcgtcggcggcagccagcccattcccgtggatgtgcgggtgttggccgcgacccacgtcgacctggaggccgcagtcgaaaggggcgcttttcgcgaagacttgtattaccggctcaacgtcctgcaagtggtgacggcgccgttgcgtgagcgtcatggtgacgtggcgatgctggccaaccacttttcgcgcttttacagccaggagacgggtcgccgcccacgcagtttcagcgagagcgccctggtggcgatggcaaaacacggttggccgggcaatgtgcgcgagctggccaaccgcgtgcgccgtggcctggtgctggctgaagggcgccagatcgaggccgttgatctgggattgcaggctgaacaggcaatttcgccgccgatggctacactggaagactacaagcaccgcgccgaacgccaggcgctgtgcgatgtgctcgaccggcacagcgacaacctgagtgtcgcggcccgtgtgctgggggtttcccggccgacgttctaccggttgctgcacaaacaccagatccgctagggcgggtaaaccgaaaagccccgcaacgacccttatcgttgcggggcttttccttgtgtgctgtagcgagcgggctcgccgtggtaaggcggcttgctgtggcgagcgggcttgccccgcgttgggctgcgaagcagcccccccggctctccctaaaagtaatacggaaacttcaagctaaacgtaaaatccggcgcatcatccgtcatcccgatcgccaggttcggcacgatcgtcaggttatccgacgccgcaatggtcatgcccacgttgaagtaaccggcgttggcatcgctggacaccaccgactgccaatccccaccgttaggcttgagcttgctcttgcgttgcaccaggtcggagaccgagaacgacatactcatcttctcgttcagggcgaacgccacgcccacaccgaattggaagctgtcgcccaggctgaccttgccgccgactttctggttgacgtcgctgctgatgtcgtcaaacgactcttgaaagttgtgggtgtaggagaacgaaccaaacagcaccgcagggtcgaacgtcttgaccagcgagatacctggcgtaaccgaccacacgccattaccggtgggcaggttttccggcacatacaggttgtcgttggcggttgacctgaccagcttgatgccaaacggttctttacccgttggcgccttgacgcgcagcgacaccaccgcatccggcagggtgggggtttcgtcgaggaacttgtaggccaccccgaagttgacgtcgccgatggtcgggtcacggctcacggattcttccgaggtggcgttggcgttgttgccggcgccgccggactgataagtcgactcgcggtaaaccaccggcacgttcacatcgaactgccaacggttatcgacgttgtaacgccccgtcaggtccagggtccagttgtccgacttgattcggtccaggttgatattacccaggaagatcgagtccagcgccaggaagccgttgagcgtgagctggcgcgcatcgtaacgcgcatacgtgatcccggtttcaaagctgaatttgccgttaccgaagaagccgctggcctcgttatagaggttgctcacgctttgcgcaggcgctgaatcgtccttgagcgactgcccataggaactgccgccgcctgcaccgccggatgccgctgccgctcccgtgccagccaccgtggcaccgctggctttctgaaagtccgccggggatttggccaggcgtttgggtgctggcgtcgccggcgtgtcctcgacctggcgcacccgttgctccaacaccgccagggctttttgctgcacttcgtaccgctgcttgagctccagaagttcctgtttgagggtctcgatatcggcgtctggcgcggcatacaacatggatgcgggcaagagcgtacttaaacagaccaccgcacgtagcgataacgatcgatgcatgaaataagccgtccttttctaatgcgaaagtgtcgagggtcagcgtagttcaataaccgagagtgcgtaggcctttgagttgatccaggttgcagttcaacgcggggttgttcaatccgttattcattaccacgttgagctgggtcatgttgttgacgaagttgttgttgccggtcagtaccgtgccttgcagcacctggccgccaccaatctgctggaggctgttgccttggttatgattggcctggatcgccatctgcaagccgccattgttggccgagacgctcacccggcctgccgcgctgtcgccggtgaccgtaccgccggccaccagcacctgccccgattgcgcggcattggaaggcgcaaagccgttttcagtgaggttgatcccgacattgttgtaggcggtgtttttgtcgccggcagcgcgcacgctctgggtcacgcctgtgccggtgcccaggccggcgcctccggtgacgttaccggtgccggtgctcgggttggtgccattcccggtcgaaccggtggtctgcacgtagaactgtggcgtaatggtcgatgagtcgacttgcatgctggccttgccggtgagggtgtcgcccacggcattggtccaggtgctgctcatgacaataccgaagctgatgatccgccccggcatcacataacggccgcgcaactcggccatttccgaatccttgagttcgatcggcttgaatgccgatgaagcataagcgggcattgaggctgccagacacaagaccgtcagccaacgggaagtgttcatctgctgctcctggagcgtcctgccccttattgcgcttcttagaagaagtcgctctggatgaaaccgaaatccatcagctcggcatcttttacaggatggaatttgtccagctggttcttcgcggtgagcggtgtgggcgggtcgagcaaggcattggccttgtcgtagccttcacccagcacggcgaacacgatgccgttccaacccttgacgaagtcgtcgcgcgaatagcgcttgtggcccagcaccgggtcgccgatatagacccagtccttgtcggcgcgctgcaacaccacgaagtgcttgtagccacgaatctccagcagcaccaccacggggattttcacggtcaccagggtgtccggcgaaatcttgtagccccgggcccgcatgccgatgctttcgaggtagcgcttcatgtccagcatggaaaaaccctgggtgcgaaccaggtcctggtctgcattgaccagcatgcctttgatcacgtggtcttcgtcgacgtcgagccaatagccctggcgcaggatggtggcgagtgccgcggcaccgcagctgaaatcggttttctgttccaccaggttggcgaagcggcgttcgcggatgctctcgaccttcttgtagatgactgcaccgccaggcatggcggaaatcgccatggtgcctgcccaggtcgggccggtgagcagcatcaagagggtgagggtcgcgaggcgcatgatcgtctgacctaatggacactggaataaaaaagggccttgttgccaaggccccgttggatcagaagcgcacgccgctgctgcaaacgctgcagccttggcctacagacaggctgttgctgccttggttgccagcgccggattgcaggttcacaccgatgttgccggagttgttgttgatcgagttatcggcactggcgttgttcgacacatattgaggtttgccgccgtgatggccgtacccggtagcggcggtattgaggtagttgttggcgagcgagttttgttcggtattggcagccgctgcgatgtttttgccatcagccgtggtgattgccaggttgtttttaccctggttgccttgaccggcttgaccgttgtaacccacgttgccggagttacggttcacggagttatccagggaggcgttgttctgggtgcctttgttgacgaagttgttcagtgcgctgttttgattcacatcgaccacagcgaacacagttgcaaagtcgcctttggcgctggagatggcgccagagttatcggcctggttgccactgccggcctgaatgttgacgccggcgttaccgctgttgccgtttaccgaattatcggcagaggcgttgttttcggtcttggtgtcgtcgtatttgttgccaatgctgttttgcacatcggtcacgacagaggcaaccacgccagttggttgaggcgctggatgccagccaccgccacctgcttgagctgcagcagccatgagtgcggcgagcgcgaaaaccattggtttcagagccatttgaggtttcatggtgtttctccttgcttctaattagttggttaagtgttggtacggtctagctagtgctaccaagctgttacttgatagtgatgcccagggtgttagccactcggttccccaccccggcactctggttcacctgtatcactcctcggctgccggtgaaggcctggtcgcttgtcacgacctggcggctgccagtggtgggggtgagccctgagtcggttgccagcgtcgtcgtgttctgttgcaacaggacgctgtcgtcgatggcttgcgggccaggattgacgctgatccgcacggcattgactaattggttattggccccggcggactggttgacgcccaacatgccgttgccattggtaaaagaagtgccctcgatcgccgccttggcgttcagggcaggatcgaccttgccgtccatcctctggatattgccggtggtggcctggccgcccagcgtgacagcgcggttgttcgccgtttgctgctggttgcccgccgcctggttgatcatcaggttgccggtgtagtccttgccgctgttgttgatcacggcgttgttgtcggccatcgccacggcgctgcccagcagggccagaatgaacagggagcgtttcatggtttgccccccagcatgccgcccaaattgttcaggggcgccatgccgcgctgaatcgaatcgctgatctgcccacccatgctgccgctgccgcccgagcggctggctgctgcgcctgcgcccagcgtggacatgccgttttgcgtggcactcaagccggtgaggttgctgttgggctggagggcggtgcgagtgatgcccaggccactgctgacgccgccgaagtcacggtcgctcaactcgcccgacagggcgctgttgatttctcggctgggattggcgttggcggtctgggggtaaggatccgggccaaaggaggagcggccatacatatgaccctgtacgtcgcggcccgtcacgatcacaccatcacctgccagggctggaagactgatactggcgctgagtacacagctggccagcagtacgttcatcgaaccttgagtgagtgtgatcacggcggcattccttattcttcacgctgaccctaaacagcgttgtcagggaaagagcagaacccgtgccgcttttgatttattactgtttttcaaaggcttgcgataactgcaaggcaaaatgatggccttgctgtatcagcggtgagacaaccgccctcgaaggcccggctatccatccactgcacaaccgcttcaccccgttgtatcagcgctgtaacaccgtgcatgacgaaacgatgaatccgctgtgcacgggcgatccagggacggtgtgtgtaaaaaaaatggacagtgcgggcgcaacgaagccaaaagcacgacgcaacaggctcagcctttgggggctttacgcggaatggaattgaggacgggattgccgtcctggttctgggtcaggtagaccggcaaaaccttgggcagggaggggatgaggttgctgacctcgttgatgttgtagatgccaccgatgcgaatcgccccggtgctggcgtcggccagcatcgccggtttgctgaggtagcggttgatcagcggcaacgcatcggccagggccaggttgtcgaggatcagcttgccttggcgccaggccagggccgagtcattcgggctgatcgcacgcacgctcggtgtggcatcgccctgttgatagctggcctgcatgccgggggtgaggggtacgctgccgtgcacctggtcgctgctgatctgcaccgagccttcaagcagcatcacccgcacttggtcttcatacttccagacgttgaactgggtacccgtcacgcgcacctggcccgcgccggcgtgcacgacaaacgggtgcgcactgtcatggctgaccttgaagaacgcctcgcccttgttcagggtgacgcggcgctggtccttgtagttgctgtagaccagctcggtgcccaggttgagctccacctggctgccgtcgccgagcgtcacttggcgcaggccgctggcagcatcgtagcgctcataggaactcggcagccaaccggcttgccagccggtaaaggcggcgaggggcagggcggccaggcagatagccgctgccaccgcataggtgcgcaaacggctgcgcggtttgaatggcaccaccaccggcgctgtgtcgctgcgcggcaggtggtcggcgacgtcccagatctccagcatcgccgcgtattcaaaggcgtgcagggggtgcgaatcatgccactgggcaaaggcctgacgttcgccgggcgtgcaatcgctcgcatgcaggcgcatgcaccaatgcgcggcggcgtcggtgatagcgtcatattcggcttctgaaagggctttttcgctcattaactcgtcctgatttcgcacattctaacctcctgggagggacggcgagaacagccatcatggcgattgcacatcaattggaacttattctcgtttggatgcgcctaaaaatttcaggacacgtgtcagtcattaccaccaatggagtacgaaaatgctgaagaaaacattaatcgccctgtgtgcaacctccgcattgctcagcgccggcgccgccatggccgaccgcccgggagccggttggatcaccattgaaaaagccatcgaggtggccaagaccaaggccggttatgtcgaggtttatgccgccgaagccgatgataacggctactgggaggtcaagggtcgcaagtcggatggcgtggtgtacgaagcccgcatagatggggcttcgggcaacgtcattcgcgatcagaaagactgatatccacccgggggctgctcaggctcccgggtccagttctcgacccaggtgagtgatcatgtaggcgattgaatcggcgttggccaggatgatgttgatgcgtttgctgtcgtcactcatgaatacctggcgcgcatcgtcgagtgtcttggcgccggtgatgttcaacacccgggtgcgtgcggtccgggaggcgtggcgcctgcccagttcttcgaattgctgcgcgtaatcgtcccagaccttgaacaagatgacgccgggtgtctgggtagacagggcgttcaagcgcaagtgatccagttcggcatggagttgcctgccacgcggggattgcacattgatcaggtcggtaaacggccgcatgctgtccaggtaggccaagtcttcagagtcagacaccaagtgggtcaactcgtggatcaaggtcgtggcgcgtgcgtgggccatgatgttgaaaggggcattcaagcggttctggtacatgtccagatcgggggcaaaaaaacggtcgagcaaatagatttttttgtcgatgtcgttgggcagggtgaaggcaatcaggtgttccgggctgtagcgcgcggtccccgtgacaaagcgtatcgagtcaggattgatcaacgtggggttcaccagttcgttcaacacctcatcgatccgtgtttccactttgccgacgtgatcgggcgtcaaggcatgaaccccgaacagctcggtaaaaaagcggcccaaccggctcagcgggtcgcgcgtgagcgcgaagttgaggatgttgcgtttgcaggtcaccgtgtagtacgtggcgacgttgagcgcctcgttgatgcactgggctttccaactggacagtgcggcgatctgcgtcatgccgaccgcttcgatattgatcgagccccattcccctatgcgagtcgcggcccggccggcaaaccgcgacatcgatttgccgaaacgaggatcacggtttcgcaaatccagcacccattgattggacggcgtaagcgccagcccaggccctgactcttcatcgcggtggatacgccagtgggtaccggcgtttcgcgccgggtagactttgcctgccaccggcacgtagtcccggccagtgtccacatcgtgatagacctgggtcttggggtcgtgtctcaggtccgtcagggcgacttcgtgttgttcgaacgcctgcaggtgggtgcgctgcggggcggtgatatccagcgtggcgagggtggtagtcgcagaggcctgcgtccagtcattgtcatcaaaggtggtcgcaggttcactgtccgggtacagccggttgagcgccttgcgcaaggacgccaattcggccacgccgccgacaaaggtcctgagtgcctcgccccagcgatgttgttgcaagtgttcactcgaggccttgaacagcttgtagctgcgccacaccaccaatgggtacgcgagcttgccggccatgaaggtcagcgcattcggaacccccttgtgcagcaggcgaccgaccactccccattgcgccgcgccttgcttgtcgaattgacaggcgagcattttcgtcagcagtacgacgttgtccttgaacaggcgcatgagaatattgcccaggatgggagcagaccccaaccgaatgtccgccgtgtcgcgccgatgctgcgccagcaggtttcgataggtggcctggtggggtgggtccaactgttggagaacccattcctgcaagtgccctggggtggtgagttcactcagcaagtcttcttcccgagcgtactcgcgcagtacatggtgcgggctgtagggcgcgtataacacccaggggcctgtggcattggtctgcggcccgatcaggtagacaccctgcacgtcggccactgaagcgccggctgtggcaaccagttgcaaggggcgaatgcacgctgtcacgccactgacttgcgcacgggcgaccgcgtcgggcatgtcgaagacctgctggataaacccccaggccgtggcggaaatccgttcttcgagtttttcctcatgggcgtattgcagcaactgccagggcagctgccggcagtagcgttgccggcgtgtgtgcgcgtcgttgtccgtggccagcagatgggtggtcagccacgtctgatacaccgatttgaggtccaactgctgcaccatttgcaccactgctgtgccgtccagcgtcgcgggcaagggtgtcgcggtgcgcgagcgtgggtggatttcatcggcctgcaggtcgggcaggtgacgctgggcaaagtcggtcaggctctgggtgttgccgttcagcgccttgcggatcgggaccaggatgttgtcggggtgcagtcccaggcctgggaaacgtgcttccagcagcgtgaccaatgcagcgctgacctgctcgttcagtggtgtgattccgtgcaggtaatcctgttcatccggtgcactgacgcgatattgctcgagcaattcggcgtgcaggatctgctcatcgggcgccgccatccccagccatacggggagtgcctgctggttggccatggcccgtgccagttgcatggccctgggcaggttggtgggcacggcctgctgcatcaccacgtccagatagtcctgcaggcgccgcgcccccaggttcatcgccagcaccgtatcgacgttatcggtgagggtttcggtatggctttgcaggcggttgtccagcaggtcgtcgtcgatacgttgcagtgggccgagggtgtaggcctggtgcggcgtgcgcaggcgattcggcaggttttccaggaagggcaggcgttggatggggtcttgcaggcgtttttgcaaggtttcgcgcaggtgctgtatggagttgaacacttcatgaccgcggcggggcgtccacagcaccgcctggccggagcgctgcgggtcggtgccgccgcgttcggtcagcaccaggcagttggccaacggctgcgcgggtgaagcggcgtcaaccatcagcgtcaacccgtaggcgtccggcaggaagccattcaaggcgtggcgcttcacccgcgtcaggctgtcggtgcgcaatacggtgtcgagcatttcctggccgcgctgcctgagggtgttgtccaaccggcgcagttctgcctcgctgcgcagcccgagcatcagggcgtgccgcaggtgagcgcgatgactgttgaggaacatctgcgggagtgggcgtacatcatggttggcgaatgtcaccatcgcgctgtcgatgattgtgttgaaggttgtcgtggtcaggctgttcaactgtttagcgataccgctgcggggtgcgctgtagaacccgacagtggtcgattcggggaccgaaacggcttcatgcgccaggcgctcgatgaagtgctcgaccatattcaatgagcgcagaggagcacgttcttcgcgctgttgtgcggcggtcgcgtaggtattgatattcacctcttcggccatcaaaggaagttggtgtttatccagctccgcattcagcgcatgggctgccaaccgtctgagtgtcggatgcgccgcacggtccgaggccagtgcctgttcaactgtgttcaactgctgccattgttgtttggcgcgttcggcctgcaccgtggacgggcgtccattgctgctggtgatggggtgcaggctccagcgcccgccggcgtccagcgtgtgcaggcgatggtcgatcaggccgcgtacatccagggcacagtccagcagcgcttccaggtttacctggccgtcgctgcgacggtacaggcccagggcgtattccatgttgctcagttgcttggccgcaatgtctttggccagttcggtaaagatgtcgccgttgatgggcaccccgatgatctgcagcgggtcaaggccgagcagcacattgcgttcatccagggacaggaaattgagtaactcgtcctcatgcccgctggccttgagcatgctgatcaaggtggcgttcagatcctccatgttcttgagcacctgcaagccgcgggtctgggtgtacaggtaggcgtggctattgctgatcatcagtgtgccagccaggtcgacatagtgctgggagggcgcgctgacgcggatcttttcgacgcgcaggttctcggcatgggcggtgcgcgctgccgcgtccgggagaaacatggccagcaactgctggctgtcttcggcgctcaggatgccttgttggcgcttgagcagcagctcggcacggaacgtgtcgctgagggtctgggccactagctccaggcgggagtggccgtccttgatgtcttcgttccagtaggtctgcaacaagctgccgagcagcttcgacaggattcccgctgtctgctccaccacgctttcccagcgacgctggtcctgggccacctgtgtcggcgtccagcccgaagtgacctgtttgggatgggtaaaggtgcgcgtctgcccgatgggccaggactgtttcaagtaatagtggagcaaggcctcgctcaacggcacggaggccagccattgcgggtcggcagtaggcgctatgtcactgagcgcaaagctgttcatgcgtgtatcgcggtgatcgaggctggggaagtaggcgcgcgccatgacggccagggacgtgtcgagcatcgttggcagcccgggaatacgacgcaattggtcgagcatgccctgcacgttgtgcaattgggcgtgctggatcgcctgctcctgatgttgcatcaccgggccttcaatggcctgtgccgccacggtcggtgctttggcagcgtccagggttgcgcgctgggcaatcgacagcaagcgcagcaagtcggcgcggcgtgagcggtccttcaggcgctcggtgatctcggtgagcacgtcggcgcggctgtcgaacacttccaggccgtcatagggcgtatagagcagtgccttttgcccgtcggggctggggctcatgatgaacgcgtcggcgagggggatgtccggtttctggttgatctgcagcagcaggctttccacgaccataggcgcttcctggtgcaccgggtttcggcgtgcgtggtcggtcgcgtaatacaggcgatgcagccagtccaggtccttgacggtcaaccccagcgcacgttctcgcggtgtgggttcgtctcgttttatgggcagcaggaattcatcgaagaagtagggaggggtgacccgggccattgcatactcaccgtcattgtatgaaggcctcagggtaaggagggccggttcgggctcggcggtaaataagtgcagcggtgggggctgatgcacaaacagacgttgacagcatgcgcgggccgcgttgtttaatcgtgggcctggatttcacgctggttgccccttccaatcataaaatcggagcttcagatgtcacaggtccatgagcaggctacggcccgcatcggctttaccgaactggtggcgttgcttcatcaggtcttcgtgaaccatggcacctcccccgaggtggccgcgatcctggcgcgcaactgcgcctgtgccgagcgcgatggcgcccatagccatggggtgttccgtattcccggttacctcagcaccctggccagcggctgggtggatggcaaggcggtgccggtggtcacggatgtcgcctcagggtttgttcgcgtggacgcagccaacggctttgcgcaaccggcgctcgaagccgcccgcgcgctgttggtggagaaagcccgcagtgctggcattgcgctgatggcgatccacaactcccaccatttcgccgccctgtggccggatgtcgagccgttcgccgaagaaggcctggtggccctgagcgtggtcaacagcatgacctgcgtggtgccccatggcgccgaccgcccgttgttcggcaccaaccccatcgcctttgccgcacctcgcgccgatggcatgccgattgtgtttgacctggccaccagcgctatcgcccatggcgatgtgcagatcgccgcgcgcaaaggcgagcgcctgccgccgggcatgggcgtcgacagcctgggccagccgacccaggaccccaaggcgatcctggaaggcggtgcactcctgccatttggcgggcacaaagggtcggcgttgtcgatgatggtcgaactgctggctgcggcgttgaccggcggcaatttttccttcgaattcaattgggccgatcatccgggggcgcgtacaccctggaccggcgaactattgatcgtgatcgacccgagcaagaccgccgggcaagcgttcgccgagcgcagccaggagctggtgcggcagatgcatgcggtggggttgcggcgtttaccgggggatcggcgccatcgcacacgggcgaagtcgcaggagcaggggatcgagatcgatcgcaaagagctggaacaattgcgggagatcgcgggactttaaacagggctgcgccgctggcgcagcccatcttgcttacttagttgcggcgaccgagcagcaggccgaccaccaggccaaaacctgcggaaatcgccacggtctgccatgggtggccaccgatgtaggtctcggtggcgtccaccaccggcttgctgcgttcgcgcacattggacaccgagtccagggcttgcttgagcttgatggcgacctgctcacgcagggtttcgccttcttcgccgaccagggcggcgctgcttttgagcagtttgtccgattcttcgatcagcgcggtcagttcgctgaaggcttggtccttgatttggtcttcgacggcttgggcagcggttttgcgggccattgtgtgactccttgcgagtgaatgtggcagtgaacaatggagtgtcggccagcggcaaaagttgcagtttttttgccgctgcctgttcttgagcaaaatccggatcaggaaatttcgacctacagtgtaagatgtcacctatttgtgcagcaggtaattcaacatgagcttcaatctcgccaacaagaccctcgccgaacgcgccgagctggaagatgaaaagtcccgcctctacgacctgtggcaaaccaacctgggcaaggccaagggcgaagccgcacgcttgttcggtgagcgcgccaagcgcaagggcaagtgggccgaatgggtccgcgcagagctcgacggcatgtcgccgccggagttctccaacatggtgcgcagcgaagtcaacaagctgatggcggccaacaagtaaagctcgccacgatcgcttcacgcactttcagcaacaacggatcaagctgcgcctgggtacgccagcccagctccaccgggtagcgcggcagtaccagcgggcagggcaacacgcgcaggccggtcatctctgcaatggcctgggccgcatgccccggaattgtggctaccgcttggctgcccttgagcaaaaacggtagcgcggcaaagtggctggtcgacgcgcacacctggcggctcaggccctgcgccgccaggccttcatcggtgatgccgataaacccgcctgacgacaccagaatgtgctcgcgcgtgacgaactcgtccaggctgatgtgtgcctggtccgaatccaccaggcagcgataatcaccttcccccagcacctggcggctcagcctgccctgggcaaaaccgccggcggtaattgccaggtccagtgtgcggtcgagcagggcaccggcgacgatctggctgtgggtctgacggaaaatcactcgcagtttgggcgcacgctgtgcaatcgcgtcgatcagtcgacggccgtaggccagctcgaaatcatcggataacccaagcaccaccgagcggccctgatactgctggttatccggattgaccattgccaggctctgccgacagcggtccagcgcctcactgatcaccggcttcaactggttggcccgcaacgtcggcgccaggccgcgcccggtacgcacgaacaattgatcgccatacacctcgcgcaagcgccgcaaacctgcactgatcgccgattgcgtgacgcccaggcgcaaggctgcgcgactggcgctggactcgtcgtgcagggcttcgaaggttttcagcaggttgagatcgacctgggcgatattcatctggctcatatcattcagcactgaagtgggctttattcatgatcgaggctggcgggagaatgggcaaccccccctttatttggagtgatcgtgatgcctgtttctactgtggcagccctgcaaatcggttccttgcccggcggcaagggtgaaaccctggcgcaaatcctgagttatgaggaccagatcctgcgcagcggcgcgcaattggtggtgatgcctgaagcgctgctgggtggctaccccaagggcgaggcgttcggcacacagttgggttaccgcctgccggaaggccgcgaagccttcgcccgttacgttgccaatgccatcgatgtaccgggcgcggaaaccgaggcgctggccggcctgtcggcgcgtaccggggccagcctggtgctcggtgtgatcgagcgcagtggcagcaccctgtattgcaccgtgctgtacttcgagccggcgggcggcctggtggccaagcaccgcaagctgatgcccaccggtaccgaacggctgatctggggtaagggcgatggctcgacgctgccggtgatcgacacagcggtgggccgcatcggtggcgcagtgtgttgggaaaacatgatgcctctgctgcgcacggcgatgtatgccaagggcgtggaagtgtggtgcgcgccgacggtggatgagcgtgagatgtggcaggtgagcatgcgtcatgtggcgcatgaagggcgttgctttgtggtcagcgcgtgccaggtccaggcctcgcctgaggcgttgggtatcgaggtggccaactggccttcagaccgccctttgattgcgggcggcagtgtgattgtcgggccgatgggcgacattctcgccgggccgttgctgggagaagccgggctgctgacggcccgcattgataccgatgagctggtgcgcgcgcggtacgactatgacgtggtggggcattacgcccggccggatgtcttcgagttgacggtggacgaacgcgccaagcctggcgtgcgctacatcaccgactgagcacaaccttgtggcaagccgtgtcaattaccaggtggcggtattgggcaggttcagcgtgccacggtccacaaagcgcatcgtgccgaacagcccacccgccagtttgcctcgcagcacgtagggcaggttgttcaggctctgggtctggctcaggcccagggtctgacgcaacacggagaacgccgaaacactcaccgggaccatcaggacggtctcggagaaacgcgggatggagccgctctggtcacttacccctgatgccaacggccggccattgacctccaggtccagggccacgccgttgtagtcgatcgccgtttcattggggttctgcacccgcagcttcacggcgaagcgcacttccaggtcctggctttgcagcggctcgatgccgaccacattgatgttcaccggatcacggttggggaacagcgcacaggcgctcaagctcagcagcaacagcgatagaaccatgagcctgcgcatacaaaggtgctcctatttcgtgacgtccgggtcctgcatcactttgagggtagaggactccggatcaaattcatcttcttccagctctatgaactcttccggcaggaaaatgttcagcaggattgcacagaaagcgcccacggtgatcggcgactcgaagatgttgtgcagcgccttgggcagctcgcgcaatacttccggcaccgcggcgacgcccaggcccataccgagggagatcgccacgatcagcacattgcgccggtgcaacccggcttcggcaaggatcttgatcccggccacggccacggtgccgaacatgatcagtgtggcgccgcccaacaccggtttgggcatcagttgcagtaccgcgccgatcatcgggaacagccccagcagcaccagcagcccggcgataaagtacgccacgtagcggctggccacgccggtcaactggatcacgccgttgttctgggcgaaggtcaccatcggcaggctgttgaaggtggcggccatcgccgagttgaggccgtcggccagtaggccggacttgatgcgcttgatgtacagcgggcccttgaccggctgttgggaaatcatcgagttggccgtcaggtcgccggctgcttccagcggcgaaatcaggaagatcaccgccaccgggataaacgccacccagtcgaacgagaaaccgtacttgaacggcaccggcacgctgatcagcggcacttcaggcagcgccgccatgtccacgcggcccagcagccaggccacgacgaagcccagggtcaggccgatcacgatcgagcccaggcgcaggaaggggttattgaagcggttgagtaccacgatggtcagcagcaccagcgccgccaggcccatgttgctcgcggcgccaaggtcgctggcgccaaacccgccggccatgtcggtgactgccaccttgatcagcgacaagcccatcagcgtgatgatggtgccggtgaccaccggggtgatcagtttgcgcagcttgccgatgaactggctcagcaccacctcgataaacgcggcgaaaaagcagataccaaagatcgtcgagaggatctcgtcagtgccgccaccccgggccttgaccatgaagcccgcgctgagaatcacgctgataaacgagaaactggtgccttgcaggcacagcagccccgagccgatcgggccgaaggtgcgcgcctgcacaaaggtgccgagccctgacacgaacagcgccatgctcaccaggtacggcacttcgctttccaggcccagcacgccgccgacgatcagcgtaggcgtgatgatcccgacgaaactcgccaacacatgctgcagtgcggcaaatatcgcggcggtgaagtgcgggcggtcttccagaccgtagatcaggtcggatttatagcgggggcgcggagcttgagcgtcagacaaaatgcgggctcgggtcagaaaatggaggcgcaggatgccagaaactgcctgtcgtcagaagtgtaaaaaaatatttataaagccccctgcgggaaaccacagcgccggccgatagcgtggtcaggcccacatactaatgacaacggtggtgaccaaggtctgggcagtgcgttgacgctgacagatcgtttcgcggcacggacgcgcgcagacactacttttgagagcacccccatgtccatccgtaatctgaatatcgctcctcgcgcttctctcggtttcgcgtttattgctgtgttagtggttgtattgggggtatttgcggtcaaccgtatgacgctgatccgccaggcctcggtggacatgagtaccaatcaactgccgagcgtgacttcactgtcggtgatcaccgaaaacgtgctgcgtatgcgcatcctttcgttccgcgtgctggtcaaccgtgagcctgccggccttcaggaagctgaagtgcgtatcggcgtgctggccgacaaggtgaagaccgcccaggccagttacgcagccttgcctgccgggcccgaggaggccgccctgtacaaggtattcacgaccaccctggacaactatctcaaggctcaggccgagatgctggcgctgtccaggcagaacaaggtcgatgagatgcgtgccctgatcaatacgcggatcaaggacggtaccgaccagatgggcgagcaactgaacaagctgatcgctatcaatgcagcggatgccaagcaagccaacgaggaagccgggcaaaattacagcagtgccatcactggcgctattgtcgtttcggttgccgctgcattgctcacggtattgctggcctggctgctgacccgcagcatcgtcgcccccttgcgcaaagccgtggaagtggccgaaaccatcgccggtggcaacctgaccaagaccattgaagacgacggcaaggatgaaccggcgcgcttgctgaatgcgttgtcgaccatgcaaggcaacctgcgccagaccatccagcacattgccggctcggccacccaactggcgtctgccgctgaggaactgagcgcggtcaccgaggaagcctccaagggccttcagcaacagaacaacgaaatcgaccaggccgccacggcggtcaacgagatgacggcggcggtggaagaagtggcgcgcaacgcggtgtccacctccgaggcgtcgacccagtccaaccaggcggcgcgggaagggcgcgaccgtgtggtggaaaccgtcggcgcgatccagaccatgacccaggacgtgcagaacactgccgcgatgatcgaaggcctggccacccaaggccgggacattggcaaggtgctggacgtgatccgcgcgattgccgaacagaccaacctgctggcgcttaacgccgccatcgaagcggcgcgtgccggtgaagcagggcgtggctttgcggtagtggccgacgaagtgcgggcattggcccaccgtacggcgcagtcgacccaggaaatcgagaaaatggtcgccggtatccagaacggcaccggtgaagccgtgcaatcgatgcaacagagcaaccagcgtacccaggacaccctggaaatggcccgcgccgccggtgtggccctggagcagatcacccagtccatcagcctgatcaacgagcgtaacctggtgatcgccagcgcttcggaagaacaggcccaggtgtcccgcgaagtggaccgcaacctggtcaatatccgcgacctggcgacccagtcggcggcgggtgccaaccagaccagcgcggccagccatgagctgtcgcggttggcggtggacctgaatgggatggtggcgcggttcgttatctgacctgaaatagggtcaaaaggtgggagggggcttgcccccgattgcaatgtgtcagctagacattggctgactgatacaccgccatcgggggcaagccccctcccacatttgccctgtgttgtgtcagcgctattgcttccaggcccctgggttcaccaggtttttcggtttttcacccgccagcgcctgcaacagattctccaccgcacacgtagccatggcttcccgcgtctcatgggtggccgagccgatatgcggcgtggccaccacattgttcaagcgcaacaacggcgagccatgatccagcggctcctgctcgaacacatccaaccccgccgcccgaatggtgcgctgttgcaacgcctgcaccagtgccgcctcatccaccaccttgccccgcgagatattgataaagatcgtctccgggcccatcagtgcgaattgttcggcgccaatcaacttctcggtttcagcagtgagtggcagcgtcaggcagacaaagtcggcctgttgcagcaagtcgttcaggctgcggtactgcgcgccaaagcgtttttccaccaaaggtttgggcgaatggctgtggtagatcaccggcatgccgaaaccgaaatgcccgcgctgggccagggcttcgccgatgcggcccatgccgatgatacccagggtcttgccgtgcacatcgctgccgaaatgcgccgggccgatattcttgctccactggccggcgcgcaccatgtcggccagctcgaccacacgccgggcggtggccaggatcagcgcgaagccggtgtcggcggtggtttcggtgagcacgtccggggtattgctgagcaggatgccgcgcccggtgaggtagtcgatatcgtagttgtcgacgcccaccgacacgctcgccaccgcttccagtcgtggcgccaggtccagcagcgtggcgtccaggcgcaggctggcacccaatagaccgtgagcggtcggcagggcatcgcgcagcttggccaggccggtctcgtccagcgcttcgatcagggtgacatcggcctgttcatgcaggcgggccatcaacggcgcggagagttttttgtacaacacgacagactttttcatgcggtctttaccttcaattccaggttgggcgccggtgtgcggtcactggcaccgggcttgagaaaaatcgtcaataccactgacagcagcaacgcgccgctcatcagcaggtacgaggcgccgggcgagccggtgctgctattgaggtagcccaccaggtacgaaccgccgaacgaaccgagggcgcccatgctgttgatcagcgccatggcgccgccggcgacgttggccgggaggatttccgggacaatcgcgaaaaacggcccgtagggcgcatacatgcacgcgccggcaatcaccagcagggtgtatgaccaccagaagtgttcggcgccgagcacataggacgcgtagaacgcgatggaggcgatcaacaacggcggccacacgaagcgcttacgtttttgcagcttgtccgagccccacgacaccaccagcatgccgatcaccgccgccaggtaaggcaacgccgacaaccagccggcctcgaccatgtccatctgcaagccttgcttgaggatcgacggcagccacaacacgaagccgtacacaccaatgctccagcagaaaaattgcagggccaggatgatcaccttgggcgagcggaatgcctcggcatagttcttcaccgccttgatgcccacctgttcagcggccagcgcgctttccaggtcttgtttctcggcgtcgctcagccatttggcctgggcgggcttttcatccgccagtttccaccagataaacgcccacaacaccgccggcaggccttcgatgataaacatccagcgccagctgaaatgctgcaccaggtagcccgacaccaccgacatccacagcatggtcaccgggttgccgaggatcaggaaggtattggcgcgcgagcgttcggcacgggtgaaccagtggcacaggtacaccagcatcgccggcatcaccgccgcttccaccacgccaagcatgaagcggatcacgatcagcatgtaggcgttggagaccacgccggtcagggtagcgaggccaccccacaggatcaggctgacgaagatcagcttcttgacgctacgcttttgcgcatagatcgcccccggtacctggaaaaaaaagtagccgaggaaaaacagcgcccccagcaacgacgacatgccgggggtgatcatcaggtcttcggccatcccggaggcggcggcgaagccatagttggcgcggtccaggtacgccaggctgtaggtgataaaaacgatgggcatgatgtaccaccaacggcgggtggcgagtttcacggtgtccatggggttgctcctgagcttgttgtagttgtggcaacagggaatgaatcaggcaacggatcgagcgggtaactctgaacgggtgggcaagccttccatatcgccacggctttgcacggcgcggctgccgatccagttgccgcgctgtaccgcttcgcggaagctgaggttttccagcagggcgctgatcatgcccacggcaaagccgtcgccggcgccgacggtatcgaccaccttgtccacgcgcacggcggcgacgaagccttggtccatttgcgtgcggtagtaggcgccgtccgggccgagcttgatcgccacggcttcggcgccctggtcgaggtagaacgcggcgatgtcggccgggtcatcgaagccggtcagcagtcgaccttcgcccaggcccggcagcacccaatcggccaggccggcaagggcgttgatttcgcggatcatcgtctgttcgctggcccacagcgacgggcgcaagttggggtcgaacgacacgctgcgcccggccttgcgcatctgcgtcatcagctcggtagacaactcgcgggtggcggcggacaacgctggcggaatgccggtggcatgcagatggcgggcttgcagcagggcagggctgatggccgcaacggacaaatggctggccgccgagcctttgcggaaatactcgacctgagggtcatcacccgtttcttcacgggacttgagctgaaaaccggtggggtgcaacgggtcgaccgccacatgccggcagtccaggccttctttgctcaaggtctccaccacaaagcgcccgagggaatcattgcctacccggctcagccaggccacgttgaatcccaggcgcgacaggccgatggcgacgttgctatcggccccggcaatgcgcttgtgaaactgcgccacttgcgccaggtcgccgctctgttcggcgacgaacatcgccatggtttccccaaacgacaggatatcgatctcagacatgggcattctccacgcgcggttggccaaggacggcgagggtggcaacgtgccgggcggtgacctcgaccaggtcatcgccttgcagcgggaattccaccgcccgggtaattccttgagtcatatgcttaagcagttgttcccacagatgcaggtcggtggcgcccggcggcacggcgaccagcttgccgtccgggcgacgggccacggccttgcaatgcaggtagtccacatgtcggcccagcaggcgtgcggcggtgagggcggattggtcctgccactgccagttgccgatatcgaaggtcatcttcaccggcagggccaggcgctccacttcgctgaagaagcgttgcatcggctcgatacgcccgccgtgcagggtctggtcgttttccaccagtaactgcacgggttggcggcggagcagggcgtgcaggctgtccaggtcgttggtgtcggtgaagtagccgagggatactttcaaccattgcgcgccgaaagcctgtgcgcggtccaaggtcgctgccagttcggcattcggttgggcgcggccggcgacccacagttccaggggcgatgagaacaccgattccaggttctgttgcgccgcggcctcggccagttccgtgggctgttcgtgggttaaaagctcttcgcgccattcgatgcgctgggcgccggcggcggcgagaacctcgacaaaactcaactggccttgttggcgtaccaagtctgcgccgtagctggaaaggctgatggagacggggtatttatgcattgttgtttacctctgaaaccggtttcatttttgttcaaaattttttagacgtgccgggtcgagccacgaaggatcaactcgggcaggaaatccagggtccgtgttggctcggtatcgccgcgcaagcgcttgagcaggcaattgaatgccgttgcaccgatggcttcggtcggctgggcgagggcggtgatgccagtgcctaccagcggataccagtccaggtcatccagggcgatcaggccgatgtcgtcgaacaagttgcaaccgaggttcttcagcacccgggtgcaggccagcgccgcgacgccgttggcacagaacagtgccttggggccaggtttggcaagaaaggtgtgcaggtgtttttgcagtgtttcatccaactccagcacagcgccggtcaatgccgggcggccggcgatttcagctttgaaactgtccaggcgctccaggcgcgagctggtgccatcggtggcttcacttaccatcagcacatcgcggtaaccctgtcgctccagatgttccacggccatgcgcactgccgccgggttgtccagccccaccagatcgctgtgcagcggctcgaccttgcggtccaccagcaccagcggcatttcccgttgcagttccagcagttggtcgaggtgatggccgagggtgttcacgatcagcccttcgatgttgtacgaacgcagcgccgccaggtgttggcgctcctgcgcgtcatcgcggtcggtgttgcacaccaccaggctgtagccatgctggcggcacgcagtttcgacgccgtgcatcacggcaatggaataggggttgcggatatcggccaccagcatgccgatcaggcgcgtgcggccgcgtttcaagccgcgagccatctggttggggcgatagccgagttcatcgatggcttgttcgatgcgcagggcgatggcatcggagagcagggcgcggtcgtcgccgataaagcgcgacacgctagccttggacacgccggcgcgctcggcgacgtcgagcatggtcacgcggctgcgctgggcggcggaaaatttgttcacggtcatcgaccttcttttcttattggaatgactgaaaccggtttcaggagagcactaaaccagtaaagtcgtcaagaagatgcagggcaaggccagatgaccggtacgctcagaccagcacacccaaccaggtcgcgcccaacagcagcagggccataccccgattgaaacgttgcatggccgtggccgaacgaaacacccgtgaagcgccggcccccagcagcgcccaagtgcccaggcaaggtatcgagatcaggaaaaacaccagggacaactgcaccacctggctttggcgctcggcaccctggccggcaaatacactcaccaccgcgagcgccatcatccaggttttcgggttgatcaattgcaggctggcggcgcctatcaggccaaggggtttttcgctggcggccacttcgacggcttgggcgggtgcactgaagatctgccaggccaggtagctcagccaggcgacgccggtccattgcatggccgtttgcactttgggcaaatgcaccagggactggcccacgccggtccccaccagcaacacaagaccggcagccccgacgcaggcgccgaggattatgggtaacgcggctctcaagccataccgcgcgctgttactcagcaccaggatattggtagggcctggcgtaatcgaggcgacaaaggcaaacaacatgaacggcaacatggcaggtgactccgacaaatccagtgatggcgtcgatcttcactggccggtatgtcatctgtctggaagatttgagcagcgcttgcggtacgcggcgggtgtcaagccgtaggcgcgcacgaaccagcggcccaagtggctctggtcggcaaaaccgagggccatcgcgacatcggcgggttgctcgcccttggccagcaagtggcgggcgcgggccaggcgcagttgcaccaggtaggcgtggggcggcaggccgaatgcgctcttgaacgcacgggtcaggcggaaacggtcgacgccgcaggccagggccaattcgtccatgcccacatcaacgtgcagatgggcgtgcaggtattcccgcgccttgtgcgcaaccagtggcaggcgcgggtcttcacggtagcgagtgcgccagtagagttggtcggtgaggcgctccaacagctggtccatggcgcgctggcgcacgatgcgcagttcgccgctgtgcagggtctggaaggcttggctggtcgccatggccaggcgcgggtcgcgggtcaaggtgctggcgaaagccagttggctattgagcggtgcttcttcaaacaccgcgctgacttcacgcgccaaccactgtgggtcgaggtagagcatgtggtaagtgaagccatctacagtgggcgcatcgccgtcatgcaattcgccgggctccaccaggaatacctggccgggcacgctgttatgtcgggtacggcggcagttgaattgctgcacgccttgctcggttacgccgatcaggtagctgtcgtgccaatgcgggtcgtacgcatgaccttcaaaatgcgcgcgcagggtctcgatgccggtgtcggcgtcctgggacaggtcgatccaattgtgcgcggccataaatcaccgaagcggaatacgtgaggctattagcgcccagcgtcgggtgggcgtctagaaggtttgtgcagcatcaaccgaacaacccggcggcgatattgatcgagaaccccaggatcgcggtgttgaacaaaaaaccgatcagcgattgccccagcactactttgcgcatcgcccgggtggcgacgcccacatcggaggtctgcaccgcgacgccgatggtgaacgagaaatacaggaagtcccaatagttgggcgtcagcagcccttcggcaaagcgcagcgccggctccttgccgtcccaggtgtaatacaggcgcgcgtaatgcacgctgaaaatcaccccgatcagcaaccatgaaccgatcactgtcagcccggtaaagccgtagtgcagcagacgttcagtggtggctaggtccttgctgccgaccagttcaaaggtgatggtcgccaggctggcgatggcggcgatgcacacggtgaacagcaccagcccggcgttttcatcttcgacctcggcgatgcgcttcacgtcctcggccttggcgcgacgggtgagccacagcatcagtaccaggtaggtccagaccccggcgttccagccaatcaggattttgctgaccagagtgtcagccggcgccaggatgcccacggcaaggccgagcacggcggcgacggagaggcgagggtgggtgcgggcgaggaagggcatggcggctcacagctgacagtgggtcaactgactgtacctcatcatgtgggagggggcttgctcccgatggcggtgtatcagtgaaaaatggttcagctgacataccgcatcgggggcaagccccctcccacagggtttaactcggtttaccggggagatttcttcactagcttcatgaccaccacaaagaacaccggcacaaacaccaccgccagcgttgcggtgatcatgccgccaatcacaccggtgccaatcgcctgctggctcgcggaactggcacccgtggcaattgccagcggcaccacgccgaggatgaacgccagcgaggtcatgatgatcggtcgcaagcgcaagcgcgcagccttcagggtggcgctcatcaggtcttcaccctggtcgtacaggtccttggcgaattcgatgatcaggatcgcgttcttcgccgacaggccgatgatggtgatcaggcccactttgaagaacacatcgttgggcatgccacgcaaggccacggccaataccgcgcccagcacacccagcggcaccaccagcagtaccgaggtcgggatcgaccagctttcatacaacgccgccaggcacaggaacacgatcagcagcgacaagcccagcagtatcggggcctgggagccggacaagcgctcctgcaacgacaagccggtccattcctggcccaggccggcgggcagttggctgaccaaccgctggatctcgtccatggcttcgccggtactgtgccccggagcggcttcgccggaaatcgcgatggccgggtagccgttgtaacgggtcaactgagccgggccctgggtccatttggcttcgacaaaggcggacagtggcaccatcttgccggcgttgttgcgcacgttgattttcatcaagtccgccacctggctgcgctggtcgccttcggcctgcaccaccacgcgctgcatgcggccctggttggggaagtcgttgatataggccgaaccgatggccgaggacagcacattgccgacatcggcaaacgacacgcccagcgcattggcctgcttgcggtccacttcaagctgcacttgcggtgcttcggccagcgcgctttcgcgcacgttggccaggatcgggcttttcgcggccgctgccagcaactcggtacgcgcggccatcaacgcggcatggcccacgccaccgcggtcctgcaggcggaactcgaagccgctggaggtacccagaccgtccacgggcggcggcaggatcgcgtaggccaccgcatctttcagctcgctgaaggccatgttggcgcggtcggcaatcgacgaagcggaatcgtcgctgccgcgctgcgaccaatccttgagcgtggtaaacgccagcgctgcgttctgcccggagccggagaagctgaagcccatgatcatggtggtatcacccaccccaggctcctcggcgttgtgcgcttcgatctgctcggccacctgcaccgtgcggttcttgctcgcaccgggtggcaactggatgtcggtgatggtgtagccctggtcttccactggcaggaacgaggagggcaggcggctgaacatccagcccaggcccaccagcaacaccaggtagatcagcaggtagcggccgctgcgcttgagggcataggccacccagccttcatagcggtcggtgaactgatcgaaacgccggttgaaccagccaaagaaaccgcccttggcatggtgctctccctgggggatcggcttgagcaaggtggcgcacagggccggggtcaaggtcagggcgaggaacgccgagaacaggatcgaggtggccatcgacagcgagaattgctggtagatcacccccaccgaaccggccatgaacgccatcggcagaaacaccgccaccagcaccagggtgatgccgatgatggcgccggtgatctggcccatggcctttttagtcgcctccttgggcgacaggccctcggtggccatgatccgctcgacgttctccaccaccacaatcgcgtcgtccaccaggataccgatggccagtaccatgccgaacatggtcagcacgttgatcgaaaagcccagcagcaacatggtggcgaaggtgcccatcagcgcaatcggcaccaccagcgtcgggatcaaggtgtagcgcacgttctgcaggaacaggaacatcaccgcgaacaccagcgccatggcttcaagcagggtgtagaccaccttggtgatcgaaaccttgacgaacggcgaggtgtcgtacggaatcttgtattccacattggccgggaaatagcgcgacagctcgtccatcttcgcccgcaccagcgtcgcggtgctcagcgcattggcgccgggcgacaactgcacgctgaccgcggtggagggcttgccgttcaggcgtgtggagaactggtattcctggctgccgacttccacccgtgccacatcgccgatgcgcacggtggagccgtccgggttggccttgagcacaatgtcggcgaattcagccggcgtcgacaactggcccttgaccaggatcgcggcggtgatttcctgggtattcgtgcccggcaggtcaccgatgctacccgccgagacctgggcgttctgcgcgctgatcgcggcgttgacgtcggctggcgtgaggttgaagccgatcagcttctgcgggtcgatccagatccgcatggcacgctcggcaccgtacagctgggccttgcccacgccatccaggcgcttgagctcgttcatcacgttgcgcgccaggtagtcgctgagcgccacgtcatcgagcttgccgtcgttggacgtaagggtcaccagcaacaggaagccggcggagaccttctccacctgcaagccttgctgggtcaccgcttgcggcaggcgcggctcgacagccttgaggcggttctgcacatccacctgggccatttccgggttggtgcccggttggaaggtggcggtgatggtggccgaacccaggctgctctgggattcgaaatacagcaggtgatcggcaccgttgagctcctgctcgatcaggctgaccacgctttggtccagggtctgggccgaagcgccagggtacaccgcgtagatttcgacttttggcggcgcaacgttggggtactgcgccaccggcaactgcgggatggccagcaagccggccagcaggataaacagggcgaccacccaggcgaagatcgggcggtcaataaagaactgcggcatggcgggttattcctttacgagcgggctgtcgtccacttcaactttttcaccggggcgcgcgtgttgcaggccttcgacgatgatgcggtcaccggccttgaggccgctgctgacgatccagcgatcgttgaccaccgcgcccaactccaccggctgctggctcacggtctgctcggcgtccagcagcaagaccatcgggataccggcgctgtcacgggtgatggcgcgttgcggcacgctgatgccttgcttgtcgacggcttgctccaggcgcacccgcacaaagctgccgggcagcaggtcgaggtccgggttggggaactcgctgcgcaggatgatctgcccggtgccggggtcgacgctgatctcggcgaacagcaacttgcctggcagtgggtacaggctgccgtcatcctcgatcagcgtggccttggcctggtcctggccaacctgcttaaggctgccagcgcggaaggcgcggcgcaggtcgttgagttcgcggttggactgggtcaggtcggcgtggatcgggtccagttgctggatgatcgccagcggcgtggcctcgttctggccgaccagcgcgccttccgttaccagcgcacgaccgatgcgcccggaaatcggcgcggtcacagtggcatagcccaggttcaagcgggcgcgctccacggcggccttgttggcggcgacttcggcgttggtctggcgcacggcggcgcgggcgttgtcgtagtcctggccgctgatggcgttgccttccaccaattggctgtagcgctgctcctgcaggcgcgccttgaaggcatccgcctcggccttgctcaggttggcctgggcgctgtcgaggtcggccttgaacggcgcggggtcgatgcgaaacagcacgtcgccctgtttcacgtcatggccttccttgaacacccgttgcatcaccacaccggcgacccgtgcgcgcacttcggcgatgcgcggcgcggcaatgcgcccgctcagttcgctgctgatcgacagcggcttggcttccagggtttcgatgcgcactttggccaggggcatttccggcgcttcggcggcagagtcaccacatgcgctaagggccagggtgagggccagcaggcaaaatggcgcaaacagattcttcgacatgctcttatcccaatattgactggcgcatcctaaggtcacctgcgccgtggtgctgtgaagctgtgtagctcgtgtgtgaagaaatgtaaggtgcggcgcgcggggcgccgggggcgtatatccttgcacaatcctgcaaacactggagatgccatgtgggagggggcttgcccccgatagcggtgnnnnnnnnnnnnnnnnnnnnnnnnnnncaccgctatcgggggcaagccccctcccacgtgggatttgtgtacgaccaacaactgtattttctggaaacacctttatgcccaacatcctcctggtggaagacgacgccgcactttccgagctgattgccagctacctggaacgcaatggctaccacgtcagcgtgctcagccgtggcgaccatgtccgtgaacgcgcacgcctgaacccaccggacctggtgatcctcgacctgatgctgcccggcctcgacggcctgcaggtgtgccgcctgctgcgtgccgactcggcgggcctgccgatcctgatgctcaccgcccgcgatgacagccacgaccaggtgctgggcctggaaatgggcgccgacgactacgtgaccaagccctgcgagccgcgtgtgctgctggcgcgggtgcgtacgttattgcgccgcagcagtctttccgagccccaggtggccaacgaccagatcatcatgggcaacctgtgcatcgacctgtccgagcgcaccgtgacctggcgcgaccaggcggtggagttgtccagcggcgaatataacctgctggtggtgctggcgcggcatgccggtgaagtgctcagccgcgaccagatcctgcaacgcctgcgcggcatcgagttcaacggcaccgaccggtcggtggatgtggccatctctaagctgcgccgcaagttcgacgacaacgccggcgaggcgcgcaagatcaagacggtgtggggcaagggctacctgttcagccgttccgagtgggaatgctgagccatgtttcgtgtattgctacgcctctacctgatcaccattgttacctacagcctggcgatctatctgatcccttcgttggtgatccagctgttcgaacaccgctacatgaactacaacatcgagcagacccgcggccagcaaaagctgatcgtcaagcaataccagcgggcaccggtggagcgttggtcacaggtgaccgagcaactgggccgcgattttgcgccgctgaaagtgcaattattgctgcgccaggacgccagctacaccccggcagaagaacagttgctggagcagggcaagtcggtggtgcgcctgggcgagtggggctggatggagcagatcagctcgccgatcaatgagcaattcgtggtcaagctgaccataccgcccgacccgatggacatgaacgtgctgtattgggcgatcaacgtgctgatcgtcgccgcgttactggcctgcctgctggtatggctgcgcccgcattggcgcgacctggaacgcctgaaaagcaccgccggacaactgggccggggcaacctggccgaacgcacacagctgccagccagctccagcatcggcagcctggcggcggtgttcgacaccatggccgacgacatcgagcacctgctcaaccagcagcgcgatttgctcaacgccgtttcccatgaactgcgcacgccgctcacgcgcctggatttcggcctggcgctggcgctgtccgaagatttgcccgaggccagtcgtgaacgcctgcatggcctggtggcgcatattcgcgagctggatgagctggtgctggagctactgtcctacagccgcctgcaaaacccggcgcaactgccggagcgggtcgaggtggtgcttgatgagtttatcgacagcgtactgggcagcgtcgacgacgaactggaaaaccccgagatcgtcatcgatgtcgcgctcgactgcgccgtggagcgcttcagcctcgacccgcgcctcaccgcccgcgccttgcagaacctgctgcgcaatgccacgcgttactgcgacaaacgcattcaggtcggcgtgaacgtctgcgccaagggctgtgaaatctgggtggacgatgacggcatcggcatcccgctcgaccagcgtgagcgcatcttcgagccgttctaccgcctggatcgcagccgtgatcgcgccactggcggtttcggcctcggcctggccatcagccggcgcgccctggaagcccagggcggcaccttgaccgcgctggcgtcaccgttgggcggtgcgcggttccgcgtgtggttgcccaacgtcgcttgatcaaagcaccttgacggcgcggccgatcgcctggattggtccggtgggcttgccggtcggcgagccccgtgggtcttccagggtcagctcgaacagctggttctgcgtcaacggtggcagcttgtccagcggcaccgacagtgtctggccgggcttgaccagccccaacgacaccggcccctgccacccatcgcccttggtccagaactgcaaggccttgtcggctggcacttccatcacgcccaaggggatcaactgaatctgctggtcattgctggcctgaatcacccagcccggtgcttggctttgcggcgcgaccagcaccaccacaaagcggggttccaggacgggcggacgcgtcagcaacagcgtggccagggccagcgtggtgaccagcccggcaccggccaggccgcgccatacggccagcaggttccaccagggggtgtgggcgctggcagtgtggcgctcgatgcgtcgccacaattcagcggagggcggcacgggctccgccaaggcggtcaacggcaacagacgctgctcccaggcgtcgactgcggcgcgcagctcggcgtcgtgcttgagtcgttgctccacttcggcgcgctgttcgccgggcagggtgcccagtacatattcgccggccagttcgtccagagggttgctcatgccatgcactcccgcagcgcggcgaggctacgtttgatccaggctttgacggtccccagcggggtgtccagtttccgggcgatttcgctgtgggaaaaaccgtcgacataggcatgcaggatgcacgtgcgacgggccgggtcgagctgctccaggcaggtgtggacttgcccggagcgtgcggtgaattcaaaggtgtcggtggctgcgacctgctcgtgttcatcgtccagcggcacttcgcggtagtgattgcgcaccacattgagcgccaagtgccgggtcacgctgaacacccagccacgggccgaaccgcggctggggtcgaaactgccggcgccacgccagatcttgatgaacgcgtcatgcacgatgtcttcggccagggccttgtcccggacgatgcgcagcgctacgccgagcaagcggctgctgtcctgctcatagagctggcgcaaggcacgctgatcaccacgcgcgcaggcctgcaggcaggcgtcgtaatcaaacacgtggtgctccccccaacgatcagtattgggggcagcgtagccgactttgctcagttggccgcccagaagatgtaatccgcctggtacttcaccacttcctgcttgcccttgttggccgcggtgcacgcgctgctcggcgccacgccacccttgagcgcgacgcgttggatgtaactcacgccgctcatcgcacccttgccttcggctgggttggccttgaccagttgatacggcaggttgcccgcgccggacggcgccacggccaattgggtgccggtgattttcgaaccgtccttggcctgccaggtggcgggcggaccgaagtaggtgccgacttgtttgccgctgcggtcattcaataccgccttgggcccgacaaacgtccactcggtctggccggcagcgttggctttgtcacggcactcgtaggtgatttcgccgacgccggtggtttccaacgccactttgtggccgtccggcaccttgatgctgtcgggcaagtcggcctgggttgcaaaggcggccggcgcggcggcgagcagggcggtgaggcagaacagtgctttagcgttcatgggtacttctccatttcagtaaaacagcggggtgactgaaaggactacccacggcgagcacgattggatgcagcgattagaaaataaacctcagagggcgcacactgtgtccccgttttacccgaggagagattggcaatgactggtgtgcacacgtctgctcaacaaggtttctctacccaggccgttacctacgcccaggggcggccggattatccacggcaactcaccggctggctggccgacacattgcgcatcagcgcgcagtccagcgtgattgacctgggcgccggcaccggcaagttcacccgtttgctcagcaccctggcaccgaccctgatcgcggtcgagccggtggcggcgatgggcgcgcagttgaccaaactgctgccggatgtgcgcctgctcaatggcaccgctgaatccatccccttgccagccgccagcgccgatgcagtggtgtgcgcccaggcgttccactggttttccaccgaggcggccctggcggaaatccatcgcgtgctcaagcctgacggccgccttggcctggtgtggaatgtgcgggatgaatcggtggattgggtcgccgcgatcaccgacatcattaccccgtacgagggtgatacgccgcgctttcataccggccgctggcgtgatgccttcagcggcaagtatttttcccaacccgaagtgacctgtttcccctacagccatgttggcagccctcaggaggtgatcatggatcgtttcctctccgtgagctttattgccgcgttggccgatgagcccaaggcccgcgtcaccgcgcaattgcaggcgctggtcgacacccatcctgcattgaaagggcgcgacaccgtggccttcccgtatcagacccaggcttacgtctgtcatcgactggtctaaaaggcataaagtcagatcatattggtataagtcgttataagaaaaatcgctatcctgcggccagaaatttataaggccgcaggtagctgtaatggatgtgggtaattttggtttcgtggttgccggcctgatcgttggttttatcgtgggcatgaccggtgtgggcggtggttcgttgatgacgccaatcctgttgtggttcggcatcaacccggccaccgcggtaggcactgacctgctgtacgccgccatcaccaagtcgggtggggtgctggtgcacggcaagaacaagaacatcgactggaccatcaccggctggctgacccttggcagcgtgcctgcggtgttgctgacgctgtggttcctggccagcctgcacaccgatcccagcgcgatgaatgcggtgatcaagcaggcgcttggtgtggtgttgctgctgaccgcgttggcgattctgttcaagaaccgcctgttggcgtttgcccagcggcatgcgggtgatagctatcacatgagcccgcgcaatctgaatgcgctgacggtggtgacgggggcgatcctcggtaccatggtggcgctgacgtccattggcgcgggagcgctggggacggtcgcgttgtttattctgtatccgttcctggctacgcggcggctggtggggactgagatcgcgcatgcggtgccgctgaccctggtggcggggttggggcatgccagcatggggaatatggattggcatctgctcgggtttttgttgatggggtcgttgccggggatctatgttggtagtcatatgacggggaagctgccggacggggtgttgcggccttgtttggcggttatgctcatggccattggttataaactggctttctgattgggggtatatccgttatttaggtaacggcggctattggttccgcccttacggcgggtcacttttggaagagcgagcgccaaaagtaaccaaaaacgcttcgccccaacactcggcaccgagcctgggcgaggtgccgagtgttggggcaagagcgttttgcttacttttgcgctctttcaaaagtgagccgctgtaagagcggaaccataagtagccgttacccaaataacggatatgccccctataaaaaacctcaacccacgacgccaggcccattcccaatctgccaaacaaacggcggctcagccccattgaccacccaatcccccacaatccgcgccttgtaaatcaccggattatgcgacgacaccgtccgcgcattccgccaatgccggtccagcgccttaccctggcgcacatccgaagcccccaacgcattgaacaactcactggtcgcccgctggatcaaccccgacaccaccacctgcgcggtagccgactcaatctcggccgccacgttcgcttcgcgctccaccgcctcatcccccccaaaccgcgccacatacgcccgttgcgccggcaacgtcgccttcagcgcactcgcctcggcggcatacaccagcgccgccacttcacccaccacctgttgaatctgcgcatcctggctgacatgcgccgcattgccatggctgtagatgcgcttgcggctgcgcacttggtgcgccacatcgcgcagtgccgcacggccgatacccgccaaggtggccagcagtaccaactggtagaacgcggtctggtatttgaagcgcgtggcaaagtcgatcacgttgtccgcctccaccaccgcatcgctaaagcgcgacgtgccgctgccggtggtgcgctggccaaagccatcccagtcgtcactgtgctccacgccaggctgacgggcgcgggttgcggcgatcacgtcgccaccggtgtcgctgcgttgggcgtacacgtcgatccagtcggcgaagatgctgccagtgctgtagaacttctctccgttgagcttccagtggtcgccgtcggggctgacctgggtgaccacgtcgccaatggccacgttgccgatttcggtccaggcacagccgacgatatcgccgtccacgaaacgcttgaaccacaggtcgcggccggcgccggacggtgcattcaggcggtcttcggcaaaggcgaagtgcccgcgcagggcctggggcacgttggagtcggcttcggccagttcgatcagcagttcgaacaactgcggcaatgaagcaccaccgccgccatattccaccggcacgcggacggcgccaaaccctgcctctttgagccactggatcggctcatggggcagggtgcgattgtgttcgcgcgctacggcaccttcggcgatgcgctggaagatcgggcggaaacgtgccgccagcgtggggtagtcgacgccgatggacagcgggttgatgacgtgatgttcggtcatggcgaggttcctgggcagtgatcgatgcagaggggattgcacagtccgtgccgggttccggggtgcgtatttacggggacaaacgtcgagttactgttgccctggcaacagcggatcgacaaaccgacgcaatccaacacactggcgatggtgccgggtatcaggcccaagccgcctggtctgggcgtttccccagcctggcacgcttgctgctcaagccctcgtacatcccttttgtacgaggtaccgtccgatgactcaacacgccgtgaaatttgcctactgggtgcccaacgtcagcggtgggctggtggtcagcaaaatcgaacaacgcacccactggggcatcgattacaaccgcaagctggcgcaactggccgaggctgcaggcttcgagtacggcctgacccagatccgtttcaccgccggctacggcgccgagaaccagcacgaatccgtggcgttcagccacgcgttgctggccgcgaccaccacgctcaaggtgatcgccgcgatcctgcccggcccgtggcaaccggcgctggcggccaagcaattggcgaccatcgaccagctcacccatggccgtatcgcggtgaatatcgtcagcggttggttcaagggcgagttccaggccattggcgaacactggctggagcacgatgagcgctatcgtcgttccgaagagttcatccgcgccctcaagggcatctggacccaggatgacttcaccttcaagggcgacttctaccggttcaacaattacaccctcaagcccaagccactgggccagccggaagtgttccagggcggcagctcgcgggcggcgcgggacatggccgcgcgagtgtcggattggtacttcaccaacggcaacaccccggaaggcatcaaggcccaggtcgatgacatccgcgccaaggcggcggccaataaccactcggtcaaagtcggcgtcaacgccttcgtgatcgcccgcgacaccgaggaagaagcccgcgccgtgctggccgagatcatcgacaaggccgacccggaagcggtgaatgccttcggtgatgcagcgaaacaggccggcaaggcgtcgccggagggcgagggcaactgggccaagtccagcttcgaggacctggtgcagtacaacgatggcttcaagaccaacctgatcggcacgccgcagcagattgccgagcgcatcgtcgcgctcaaggcagtgggggtggacctggtgctcgcgggcttcctgcacttccaggaagaagtcgaatacttcggcaagcgcgtgttgccgctggtgcgtgagctggaagccaaggcggcaatcaaacaggtggcttgatccgtgcaagcttgatccgtgcaagtagtgagcgggcttgctacaggtgtttttccaggcgaagggcgggagtgtggtcttcgtagtagtcgttgatcagggcaaagcgccgataaccgttgcgctcatagaggttgagggcgccggggttgtcggtgcgtacttccagacgtatgcaggtatagccctgtgccactgcgatagcttccacgtcgttcagcaactgcttgcccaagccaatgccgcgtgcatgctcggcaatggcaatcgaatacaggcgcgccgagcaggcgccccgacgaaataacaccagcgcatagccgagtaactgccggtcattttccgccaccagcaactggccgtgggcgcggctgaccatccactggaaactgcgcgatgacagccggtcgctgctgaaacagcgctgttccagtgccaccagttcagacacatcgttggaggttgcaacgcgaaagcaaagagccatatgaccgccgtaaaagttgtgtaacgaaacgggacttctctaaatgatcgtgcttaatagaaaaggtcgagttctctaaagcggatcaactattatgtcggcggtacaaggtcattggcgtgaagtatcggagcaaacagtcgcgacgacaataactgataaaggttatttttctgccgcactcaaaggaacccgtcaagtcgtgattattgtcgagcgcaaggaagattgggcctcctacttccccagcgaagacatcgtcaccgcccaggaatacctggaacagacccgggaaaccgagaccggcaagcgggtgcaggtgatcaacctgtgccgcagctacaagtacctggggcacggttactactgctcgctgctggccgaagcccgtgggcacaaggtgattccgtcggtgcgcaccatcagcgaactgaccaagaagtcgctgtacggcctggccctggatgacctggataaaaccctcgataaagccttgagtcatcatctttacagcaataccgaaggctttaccctgacactgtattttggccggaccaatatagagccgttgcaggacctggcccgtcagttatttgaagcgttcccgtgtcccatcctgttagttgatttcaaaaggagtaacggctggcatatcgaagggatcaagtccggtgtattgcacaagttgcgcgatgaccaggaagatcaattcgcccatgcgctggacaacttcagccgcaagatatggcgccagccgcgctcacgtcgcctggcccgttatgacctggccatcctgcacgatccccaggagcaattgccgccgtcgaatgccaaggcgttggacaatttcatccgcgtgggcaggggcctgggcatcgatgtggagttgatcgagcgcaaggactattcgcgcctggccgagtacgacgccttgctgatccgcgagaccaccagcgtcgacaaccacacctaccgcttcgccaagaaagccgaaagcgaaggcctggtggtgatggacgacccggcgtcgatcctgcgctgtaccaacaaggtctacctcaccgacttgctcaacagccaccaactgggcatgcccgccaccgaaattctgtacaaggagcgaccggaagacttcgagcgggtcggcgagcgcctgggcttcccgctggtgctgaagatccctgacggttgcttttcccgtggcgtgatcaaggttgaaagccaggaagccttgctcaaggccaccgccgagttgttcgagcattcagtgctgttgctggcccaggaattcttctacaccgaatacgactggcgcatcggcgtgctcaaccgcaagccgatcttcgcctgccagtacttcatgtccaagggccattggcagatctacaaccacaaggccatcggccaggccatcaacggcgaatgccgcaccctggcggtgcatgaagcgcccagggcggtggtcgagttggcagtgaagaccgccaacctgatcggcgatggcctctacggcgtcgacctcaagcagtccggtgacaaggtggtggtcatagaggtcaacgacaacccgaacctggatgcgggcatcgaggacgcctacttgcaggacgacctgtatggcctggtgctggaggagttcgtgcggcgcctggagttgaagcgtcagggccaggtctggtgacccggcgatgatccagcgtttcgagctgatcgatggcaagctgcagggcggggagagtgacgcagccccgatcatgctgttcaacaaccctgacctggccgaacgtgggtggctgcgcgaccatcacaaactggatgaacacgccctggcctcggccctggacccggatgaagtctcgcgtatcgagtttcaccccgacaatctgttcctgatctggaaacgccccgagaactactccggcggcggcaacctagtgttcgaagtgtcgtcctgcggcctgctgttttcccccagccgcctgctggtgatcgccaccgacgaaaccccgctgaccggcctgggcaagcgccgtccgctgcacacgccgctggatgtgctgctcgacctgctgctcaacaacatccaccattacctcggtcatctcaaggtgatcaagctggtcgcccgcgagctgcagcagcagttcaatgcgtccatgagcaaccaccacctgatgcagatgttcagcctcagcgaaagcctgatctattacatcaacgcgctgcacagcaacggcgcggtgttgtcgcggctgcgcaaccacgcagagaaggagcatttcagcgctgagatcattggcttgatcgatgacctggtcatcgagaaccaccagtgctacaaacaggcggagatctattccaatgtgttttccgggctgatcgacgcgcgcggcaacctgatgaacaacagcatgaacaacctgttgcgcaagctcacgctgatcaacgtggtattcctgccgctcaacctgattgcgagtatcggcggcatgtcggagttcagcatgatgacggcggggacgccgtggtgggtgtcgtatccactgttcttggcggcaatgggagtgggcggtgggttgatggtcctgggcctcacgcgcatcaaattgtaggcgctggcgtcagggggagggttgcaacgtcaggacctcaaagccgtccgccgtcaccgccaccgtatgctcccactgcgcggacaggctgttgtccttggtcaccaccgtccacccatccttcaagctgcgcactttcgagctgccctggttgagcatcggctcgacggtgaacaccatgccttcgcgcaataccagcccggtaccggggcggccgaagtgcaggacctgcggttcttcgtgcatctcgcgcccaatcccgtggccgcaatactcacgcaccacgctatagccgttggcctgcgcatggctctggatcgcatggccgatatcccccaggcgcgcgccgggcttgacctggcggataccggcccacatggcttcaaaggtctgctccaccaggcgccgggccttgggcgcgacgctgccgatcatgtacatcttgctggagtcggcgataaatccgcctttttccagggtgatgtcgatgttgatgatgtcgccgtccttgaggatctccttggcgctgggcatgccatggcacaccacctcattgatcgaggtgttgatgcagaaggggtagtcgtactggcccaggctcgccgggcgggccttgaggtcattgcggatgaaggcttcgacggcggcgtccagctccagggtggagcggccggcggcgacgaacgcatcgagcatgctgaagacctgggccagcaggcgcccggactcacgcatcacggccagttgtgcggcagtcttgatcatcaactgcgcccccggatcaggtcaggtttgtccagcaacagtttgttgatcaactcgttgtagggcagctgggggttgagctcggcgagcaggccgatcttgatccagaattcggcctgggcgttgatggagcggtccatcgcggcgctggccaggcgcagttgttcgtgcagttggtcggtgatcttgacgatgcccatggtgttcactgtgctgggttgatatacaaagcgtatatgtttcgtatatagggcgtaaacccccggccgctaaatggcgtaaggccattgacttgggcgcgggccgccggttagtttcgtgacatgacctttcaaacctttcgcagccagccaagcattattaccgccattcctcatttggcgggatagcgcacggctctacccaaacccgcccttgaggcgggttttgtttttccgtctcccgggccctttacaaaaagccaggagacagccatgagtacccgccccgagaccgccgacacgggcttgcttgaacagtatgtgaagaagatcctcgccgccccggtctacgacctggcggtgcgcacgccgttgcaggtcgcgcccgcgctatcggccttgctgggcaaccaggtgctgctcaagcgtgaagacctgcaaccgaccttttctttcaagatccgcggcgcctacaacaagctgatgcagttgagcgacgcgcaaaaggcccggggcgtggtcacggcctcggcgggcaaccacgcacaaggcgtggcgctggcggcgcgggagctggggatcaaggcgcgcatcgtgatgcccgccagcaccccggaactcaaggtactcggcgtgcgctctcgcggtgctgaagcggtgttgcatgggcagagtttcccctttgccctggcccatgcgttgcaactggccgagtcatcccgcgccaccttcgtgtcgcccttcgatgacccggatgtaattgccggccagggcaccgtggccatggagatcctgcgtcaacaacagggcgcgttggacgcgatcttcgtgcccgtgggcggtggtggcctgatcgccgggatcgccgcctatgtcaaatacctgcgtcccgaggtgcgcatcatcggcgtcgaacccgaaggctccagctgcctgttggcggcgctgcaagcgggggagcgggtggtgctgcccagtgtcgacgggtttgccgacggtacggcggtggcgcagatcggcgcctacgggtttgaaatctgccgccattgggtggatgaagtcatcaccgtcagcaacgacgaattgtgcagcgccatcaagttgatctatgacgatacccgttctatcaccgagccttctggcgcattggcggtggcgggtgtgcgcaagtacgtggcaactagaggcgtacaggggcagaccctggtcgcggtcaattcgggggcgaatatcaacttcgatagtttgcgacatgttgctgaaagagttgcggcgcaaagcgcaagttcagggttaaacgtttaatcgcagccaatcgacgacgatttaaacaacgctgctttacttatataacccggcccatcgcttatgaggaaaggttacaacgatggccgattttgccgagtaggcttgggtgttacaagcgtcttccagggtcggcaagacgcagcgggcgagcgcccgtgggtttaataacaatctgttggcagtctcagaaaaggagaggttgaccatgctttcggaattagaacttcgcagcattattgaaggaagtttcctgcccaaacggtgcgaatgcaccaaagccgaagatgcttcgctgacgatcaaggtctacgacgaccatgaccgtgaccgggtggatttggaagtcaaaggcatcaacgccgataaactcgacagcagtcgggccatttgcaacttgatcaccgggttacgtgaagatctcaagcacgcccatacccctatcctgcaacgtgcaggaggacgggcttactgaatacttgaatgttgaaccgtgggcctggtgattgccaggcccagtgctgtccagtcagttctggaagtcgcaggcgtcggacatcttccgatagctcacgtcttcgactttgccggccttgtccaaaaacttgatatccgccttgatgactttgcattcatcggtcggggtttcgttcatggccaggaccttgtcaatgttcatcggcaggccgtagtggtagggcacgggtttgacagtggcgacttgatcgtcggcctgggccaggcctgacacggctgccagcgccaggctggcgccgagcattaaggtgcgcagtttcatggtgttgctccgcaagtgggtaccacttcactgtcgacttgcgggattaaccatcgattaatgtttagttggctgacaaaatcttcatccaagctgctggcggtagggcaggtccgggccggtcttggtgcaggtcagcgccgcggcgcggatcgcaaagccgagcatggcgtcgatctgtgcaagggtcagccgttgcaggccgtccaccgaatccagctgctgctcggtcagccaggcgatcagcgcggcctggaaggtatcgccggcacccaccgtatcggccatcaccaccttgaccgccggcgcagaccaattgccgtgctggcggctgaacacgctggcgccgtcaccgccacgggtgaggaacaccaattggcaacggtgttgcagccagccctgcagcacgctttccggcgattggtccgggtagagcaaatgcaggtcttcgtcgctgaccttgatcaggtcggcatgcttgaccagttcggccacgcggtcgcgccacagttggatatccggctgcgggttgagacgcacgttggggtcgaggctgatcaggcgcttgccgctttcgcgcttgaccaggttcagcagcgtgtcgccgatcggttgcactaccagcgagaacgaaccgatgtgcaggccgcgaatatcatcgcccagggcaggtagatgggcgatttccagcagccggtcggcgcagccttcgccacggaagttgtactgcggtgaaccatcggcgcccacggcgaccatcgacagggtggtcggtgcggcgaactccaccaggaactgctcgctcacgccttcatccttgagcacctgcaataagcggcggccaaggaagtcggtggacaagccgccgaacaacccggcctcgatacccaggcggcgcaggcctaccgccacgttgaacggcgaaccgccggcaatcgccttgtagttgaccttggaggcctgcccgctggcatcttcctcgctgaagaaatcaaacagcgcttcaccacacaccagatacatagtcgttcgctcttaaagggttgccacgagttgttgatagcgctcgtaagcctgctggtaggcgcccacgctggccgccaccggcagggtccggctggcggggtcgacgcttacgcatttgtcgcaaaggctggccagcgcttcgccggactggcaccacgccgcctggatcgccgcgcccagggcggcggcttcgctttgttcggtgcagatcacttcggtgttcatgatgtcggcgaccatctggcgccataccgggcttttcgaaccgccgccgatcaagcggatgctctggctttgcaggccggtctcgcgcagcaggtcgaggccgtagcgcaggccgaaggtggtgccctcgaccacggcgcggcacaggttggcgcgggtcaggttggtcatggtcaggccgtgcaggctgccggtggcgtggggcagggcgggtacgcgttcaccgttgaggaacggcagcatgcttacaccgtcggcgccaattggagattgctcgaccagggcgttgaacgcggccaggtcgaggtcgaacagctcgcggaccaccccggtggcattggtcaggttcatggtgcagatcaatggcaaccagccgccgctggatgagcagaaggtagcgaccgaagcctgcgggctgacgttgggttggtcggcaaacgcatacaccgtgcccgaggaccccaggctcatggtgatcacgccaggcgcgatattaccggtgccgatggcgcccatcatattgtcgccgccgccgctggaaacgatggcattggggttgatgcccaagcgttcggcgatggccggcaggatcgtgccgacgctttgattcgcctcgatcaacgctggcagcgccgcttcaaggcggccgctggggtcgatgtgcttgagcaggtccacatcccattcacggctgcgcacattgaagtagccggtgcccgacgcatcgccatactcggcgacggcacggccggtgagccagtagttgaggtagtcgtggggcaacaggatatgcgcaatgcgcgcaaacaggtccgggtgctgttcgcgggtccacagcagtttcgacacggtgtagcccggtgcaatcgccacgccgaggcgttccagcgagacgttctcaccgcctagatcggccagcaggcgctcgttttcaggcgtggtttcggtgtcgcaccacaacttggccgggcgcaacacctcaccgtgttcatccagcagcaccaagccatgttgctgcccggacacgccgataccgaggatgtcctggccgtccacaccggcctgttgcagggcgcggtgggtggcttcggtgaaagcgtccagccattcctgggtgtgctgttcgcggcggccgttggcgccgctgatcagggtgtgcgccgcagcgccgaggccgagtaccttgccgctggaggcgtcgaggacgatggccttggtgccttgggtgccgcagtcgatgccgagaaacaggttttgctgggtcatgagggtgtgctcagcagtttattgttcgagttggccatgcattccaatgtgggagggggcttgcccccgatagcgctgggtcagctaaagatgcatcaactgacactccctcatcgggggcaagccccctcccacatgtttaggtcggtttcttcaggagttgctgcagtgttttggtcacgccgttatcgcgcaagctcacataacaccgctcgaacgctgccacaaactcagccgacttgggaatagccgtgccaaaaatctcctccacccccagcaggcgtttgctgatcaatgcatcctcactcaccagcccctggcagaactcggcgcgcggatccgggatcttgtagctcacgccattctcatccacgcccttgaggtaaagcgcccaagcggccaccaccagcgccgcacgctcggtctcgcgcccatcggcaatcaagcgattgatggtcggtacggtgaacttgggaaacttcgacgagccatcggaacacacgcgttccaattgatcggcaatcgcctggttggagaagcggtcgaccaatgtctgcttgtattgcgtcaggtcgatgcccggcaccggcgccaggttcggcgtgacgtccaggtccatgtaggcgcgcatgtaggccacgaacagcgggtcattcatggtctcgtgcacaaaccgataacccttgagaaaccccaggtaggtcaacgccaggtggctgccgttgagcaggccgatcttcatctcttcatagggcgtaacgtcatcggtgaactgcacgccgaccttttcccaggccgggcgaccgttgacgaatttgtcttccagcacccactgcacaaagggttcgcacaccaccggccaggcatcgtcgatgccgtgctcgtcgtgcaattgcaggcggtgggcggtgctggtcatcggcgtgatgcggtcgaccatggcgttgggaaagctcacattggccttgatccagtcgtgcaactcggcgttgtgcagggcggcgaaggccagcagcgccttgcgcgtcacggcgccgttgtgcggcaggttatcgcaggacatcacggtaaacgccggggtgccggcggcgcggcgctgggtcaacgcggcgcagataaagccgaacacggttttcggtgcgctcggctgcgccaggtcgtgctggatctgcggcaagtgggccatgaactcgccgttgctgtcgtcgatgcagtagccgccctcagtgatggtcagcgacacgatgcggatggccgggtcggccagtttgtcgatcagcgcctgggcgccgtcttcggccagcagcatggcgctgatcgagccgatcacccgcacttcggtgtcgtcggtatcgcccagttcgtacagggtgaacaggtagtcctggccagccaggtcgtcgcgggccttgcggtcctcggcgcgtaggccgacgccgcagatgctccagtccaacccttcgccggtgttcatcagcgcatcggtgtaatacgcctggtgcgcacggtggaaaccgccgacgccgatatgggcgatgccctgggtggtgctggcaatcgcatagctgggcagcttcacttgcgatgccagctgggtgaggttgtgtttattcagtttcatcagctcaatctcgcgaaatcaggcggcagcgcgcagtgggcgggccacggccacgccatcggtgtcgaacagatggcagtgcgccgggtccaggtacaggtgcagcgtctcgccgtactggctggccatgtcgccacggatccgcatggtcagcggctcgccattggcggtgatgacgtggcagaaggtgtcgctgcccaggcgctcgccgacgtcggcggtgacggtcagggtggtttggccgggcgtggcgatttccaggtgctccgggcgaatgcccagggtcaccgcgctgccgacgcgcaggctggcgctgctcaacggcaggctgatgctggtgccggcgtccagttgcacttcgcagccctggccttcgacacgggtgaccgtgcccttgaggaagcccatcttcggcgtaccgagaaagcccgccacgaacaggttggccggctggtggtatagctccagcggcgagccgacctgctcgatacggccactgttcagcaccaccactttgtcggccagggtcatggcttcgacctggtcatgggtcacgtagatcatggtcgcctgcagctctttatgcaggcgcgccagctccaggcgcatctgcacgcgcagcgcggcgtcgaggttggacagcggttcgtcgaacaggaagatcttcgggttacgcacaatcgcccggccaatggccacacgctggcgttggccgccggacagttgcttgggcttgcgctccagcagcgggcccagttccaggatgcgtgccgcttcgctgactttgctttccaccagcttcttgtcgaccccggccaggtccagggcaaacgacatgttcttgcgcacgctcatgtgtgggtacagcgcataggtctggaacaccatcgccaggtcgcgcttggccggggtcacttcggtgatgtcgcgcccgtccagttcgatggtgccttcgctgacttcttcgaggccggcgatcaggcgcagcagggtggatttaccacagcccgacgggccgacgaacaccacgaattctttgtcgttcacttccaggtcgatgcccttgatgatggaaaagccttcgaagcctttttgcagattcttgattttcaggttggccatgatgggcctccgctaggaattattatttaacggcgccgaaggacaggccgcgcaccagctgtttctggctgatccagccaaagatcagtatcggcgcgcaggccagggtcgacacggcggacaatttggcccagaacagcccttcggggctggagtacgaagcgatcagcgcggtcaacggcgcagcggcggacgaggtcaggttcagcgaccagaacgcttcgttccagcacaggatcagcgacagcaacacggtggaggccaggccccccttggcaatcggcaacagtacgcggaccatttcctgccacagggtcgcgccatccaggcgcgcggcttcgaggatgtccttggggatgtccttgaagtaggtgtaaaccatccagaccacgatcggcaggttgatcagggtgtagatgatgatcagcgcgatgcgtgtatccagcaggccaaaactcttggccagcaggtagatcggcatcagcacgcccactggcggcagcatcttggtcgacagcatccacagcagcgtgcccttggtgcgctgggtttcgtagaacgccatggagtaggcggccggtaccgagatcagcaggcacaaggcggtggcgctgaaggaaatcagcaccgagttccacgcataactgaagtagttgctgcgctcgttgatgtgcaggtagttctccagcgtcggcgtgaagatgaactgcggcggcgtggcgaacgcgtcgatttcggtcttgaagctggtcagcaccatccagaagatcgggaagaagatcaggatcgcgatggcccaggccagggtgccgagcaacaggctttgcaggcggcgggattgttgaagcgtcatggcgcggccctcaaggcttgtcagtcaggtttttgccgatcatccgcaccaggatgatcgccgcgatattggcgatgaccacggcaatcaagccgccagccgaggccatgcccacgtcgaactgcaccagcgcctggttgtagatcaggtaggcgaggttggtcgaggcgtagccggggccgccgttggtggtggtgaagatttcggcgaacaccgagagcaggaagatcgtctcgatcatcaccaccacggcaatcggccgggccaggtgaggcagggtcaggtgccagaagatcgcgatggcgccggcaccgtccaggcgtgcggcttccttttgttcctggtcgagggactgcatggcggtcatcagcaacaggattgcaaagggcagccattgccacgacacgatgatgatgatcgacagcaacgggtagtgcgccagccagtccaccggctcggcaccgaacagcttccacacggcggcaagaatccccgacaccgggtggaaaatcaggtttttccagatcagcgcaccgacggtgggcatgatgaagaacggcgagatcaacaacacccgcaccaggccacggccgaagaactcactggcctccagcagggcactgatcaacacaccgaacaccacgctgatcagcagcacgctgcccaccagcaacagggtattggtagcaccgggcaggaagcccgagtcggtcacgaaatacgtgaagttctccagcccgacaaactggttttcaccggggtagagcaggttgtagcggatcagcgaaaagtacagggtcatgcccagcggcacgatcatccacagcagcagcaaggccaccgaggggctgacgaggaaccagccggggttggccaggcggtttttggcgggtgtattcatggtattcacgaccggtacagagcaagaatcggagtgcgatcagtgtgggaggggcggtgcgacgattcgacttgcccccgatagcggtgtgtcagtcacacattcatcaactgttagattgctatcgggggcaagccccctcccacatttgactgtgggtagggctggattacttggggtagcccgcccgcttcatttcacgctcggtggtggtctgcgcggcggtcaaggcttgatccaccgtctgctgaccggtcagcgcgcctgagaaaaacttgccgacctgggtcccaatcgcctggaattcaggaatggtcaccaattggataccgatatacggcaccggcttgagcgtcggcttggtcgggtcggcgactttcagcgattccagcgtcaccttggcaaacggtgcggctttcatgtactcgtcgctgtaggtcgacttgcgcgtgcctggtggtacgttggcaacgccatcggtcttggcaaccaaagcgccatattccttggaggtggcccagctggtgaacaccttggcggcgtccttggccttggaactggttggaatggccaggctccaggagtacaaccacgacgtacctttgtcggtcttctcatgaggggcaaaggtgaagccgacatggtcagccactttgctctgggtcttgtcggtgacgaacgagccggccacgctggcatccacccagatcgcgcacttgccgctgttgaacagcgccaggttttcattgaaaccgttgctggaagcgcccggcgggccggatttcttcatgttgtcgacgtagaagttcagcgcatccttccattcagggccgttgaactccggttgccatttctcatcgaaccaccgcgcgccgtagccgttggccagggtggtgatcagcgccatgttttcaccccaaccggctttgccgcgcaggcacaggccgtattgctctttggtcttgtcggtgagtttgctggcgaattcgccgatctgggtccaggtcgggtgctcgggcatggtcagcccggcgtccttgaacaggtcggtgcggtaataggtgatcgagctttcggcgtagaacggcagggcatacagcgagcctttcacggacaaaccgtcacgcactgaagggaatacatcgtcgaggtcgtaggacgccggcagatccttcatcggctccagccaacccttggcgccccacagtgcagcttcgtacatgccgatggtcaatacatcgaactgcccaccctgggtggcgatgtcggtggtcaggcgttgacgcagtacgttctcttcgagcaccacccagttcagcttgatctccggatgctcggcctcgaaggttttcgagagcttttgcatacggatcatgtcgctgttgttgacggtggcaatggtcagggtctgcgcgccaaggctgacggcgctgatagtcaagcaggtagaggcaagcagaacttttgctgtgaatttcatcgcgcactccgtttccgcgcccagggggctacagaaggacagttattgttgttgtgtcttcccacgagctgtcaggaagagtgtgcgttgattacagccttgaaatggggttgtgacaaatccttgggcgcactggcactgatacttttttgcactcgggctcaagccggctgaaactattaagccaggttctgttcggtgagccgctgcaccgccaggcgccggtagtgggaaggggtcatgcctttaagctgctggaagcgtcggttgaagttggaaatattgttgaagcccgactcgaaacacacatccgtcacggctttatccccatcggccaacaactcgcaggatttgctgatacgcaaacgattgacgaattcgatgaacgtacgcccggtagcctgtttgaacacgcgtgagaagtaagtcggcttcatccccaggtattccgccacttcctcaagcggcaactcgcgcgcgtagtgcgcaaaaatgtaatccactgcacggttggtgcggtcgatgctgtgttcatcggccagttgcggcgtggtcacaccggacagcagttggtagtcctcgcaggcgctcaatacttccagcaggataaagaagtgccccaggcgcgccatgccctgggcgtcctcgatgcgttgcatcagggtcatggcctgggcgatggtctttttgcagcgaaactcgatgccgtactgcgcgcgttccagcagtggtgccaggcttttgagttcggcgaagatgtggctgccgtgctcgaacagttcatcggtgaaattcaccagcatgtcgcgcttgggcaccacctcgtcttcgtccacctggctgatccagttgtggggcaggttggggccggtgagaaacaggctttccgggtagaagttgccgatatagtcgccgataaacaccttgccggagctggcgacgatcaggtgcagctcgtattccttgtggaagtgccagcgcaccagcgggcaagggaaaccgtgttggcgatagatgatggacaggccgttgtggtcgtccatcagttcgtaggaagggtcggtgatgcgcgctgctcgggtcatgctgccgccgctttattgtggttgctgcgtaggataatgcccccttgcgcacgacctcgccagcgtcgatgtttatacgttgcggttttttgcctcgatccactgcgacatgtactgggtacttttatgggcgtggtggcgcagcatgctgccagtgaagttatcgcgtcgatgggccgcgaggtgttgacggcactgctccaggcaggccaccagcgccgggccgtggatgtcctggtcataccgccgggccagcagttggcgaccgtcttcctgggcctgggtccagcgttcacggtcttgatacaacgccaccgccgccgccgcgagggcaggtgcgctctgttctactgcgccaggccatggctgttcatcccccatggcctcggcgccgattggggtggtgacgtttggcgtgccgcagagcattgcatctgccagcttgcccttgatcccggcgccgaaccgcaacggtgccaggcagatgcgcgccgccgtcatcacttgcaaggcgtcttcggcccagttcatcacatgaaacccttgtgccgggttatgcaaggccgtggctttgggcggggtgtaggcgccataaatgtgcagttgcgctcccgggagttgctggcggatcagcggccacaggctgtttttcatccagagcaccgcatcccagttgggggcgtggcggaagttgccgatgctgaggaaatgggcgcggtcttcaaatggcgcgaagggctcggtcggccgctccagcatcagcgggcaccagtggagcagggcgggcggcaccttgaagtgctcggtcagcaggcggatttccacgtcggagatcatcaggctgatgtcgcagcggtaaatcgccgcgatttcccgtttggccaggtcggtctcggccattagtcggaactcttccggaagtgccgggcagaacaacgcgctgaagtcctcggtgtcgggatgcgccttcaggtgatccttgacgcgttggtgacgggcatcgcgcaagctttgcaggtcggaggtttccaggacacgcagggcgcctgggcagcatttttcgacgcgccagccgaactgctcctccatcatgaaacggtcgaacagcacgatatccggggccaactcgcgaataaaatcatcgaaactgcggttattgagttcgatggcgcattcggcgatgcccagcgcaggcaaatcggccttgtgctcgccgacggtcgcggggctgctgaaggttatgtcccaaccttgtgtaagaaagctctgaagaatctgcatcatgtgcccgcctgcggccgaggaacacggctccggccagacataaccaatgaccaggactttggtggcaggctgattcatcaacaacaggttccttgaagggcagggcgatcggcgcgcaattaaaccataaccggcggcatgacaatttatgtctggcggtaggtagccatcgcactttgtggttaacttccgcctctcgaattcgtttcatcaaacccagcataaggattctgttcatggctcaagtcacccttcgtggtaatcctgtccaggttgaaggcgaactgccgaaaaccggctccaccgctcccgagttcagcctggttgctaccgacctgtcgcaagcgaccctggaaaccttcgccggcaagcgcaaggtgctgaacatcttcccaagcgttgacaccccgacctgcgcgacctcggtacgcaagttcaacgcccaggccaacgacctgagcaacacggtcgtgctgtgcatttcctctgacctgccgtttgcccagaagcgtttctgcggcaccgaaggcctggacaatgtgctgagcctgtcggacttccgcaacgccgacttcgctgtcgactacggcgtttccctcgccgacggcccactgcagggcctgactgcccgcgccgtggtggtactggacgagaacaacaacgtgctgcacagcgaactggttgcggaaatcggccaggagccgaactacgaagcagccctggctgttttgaagtaactgtttcggtacgttactgtcgttttgcagtaacacgcttgatgcatgattgcggcctggcctagtccaggccgtttttatttgtgcctcaactgcttagcgaaatagcgggcagactaagatcagcagttaaaagttgtaagcccaaggtaaatagccggtaaaggcgcttttctaaatgcgccccagtgcttatctttcagcctcccaaagaagaagctctcgcgcccaatggttgatcactccatgcaatcctccccccgtaaatcccgccgctggctgttcggcctgctcgtgctgctggttatcgccggcctgtgctggaaattctggcccggcagccataaggatggcgccgaaaagcctgcgggccatgccggcaagacggggatgatgcgcccggggttcggcggctcggccggcccggtgccggtgcgcgtggccccggccgtgctgggagaattcccggtgtactacaaggcactgggcacggtgaccgcgctcaataccatcaatgtgcgtagccgggtgggcggcgagctggtgaagatcgcctttgaagaaggccagatggtcaaggccggcgacctgctcgccgagatcgacccgcgcagctaccagaacgccttgctccaggcccagggcacgctgatgcagaaccaggcccagctgaaaaacgcccaggtcgatgtgcagcgttaccgcgacctgtacgcccaggacagcatcgccaaacagaccctggacaccgccgaagcgttggtcctgcaataccagggcacggtcaagaccaaccagggcgcggtggatgacgccaagctcaacctcgaattcaccaagatccgtgcgccgatcagcggccgcgttggcctgcgccaggtcgacgtgggcaacctggtggcggccaacgacaccaccttcctcgcggtcatcacccagacgcaaccgatcagcgtggccttcaccctgccggaaaacaccctggaaaccgtgctcacccgctaccacgccggcaacaaactgccagtagaggcctgggaccgtggcgacgtgaagaaacaggccactggcgtgctgcagagcctggacaaccagatcgacgtcaccaccggcaccctgaaattcaaggcgcgtttcgataacaaggaccaggcgctgttccccaaccagttcgtcaatgtgcacctgctggccgacaccctgcataacgtggtgctggcgccgtcggcggcgatccagtttggcaacagcggcacctttgtctacgtgctggacggtgacaagaaggtcaagatgcagcccctggtggtcggcgataccgatggcgacaacaccgtgatcaaagagggcctcaaggcgggcgaccgcgtggtgctggaaggcaccgaccgtctcaaggatggcagcgagatcgaagtggtcaacgacagcagcgaagtgccgaccaccccgaccgaacacctgcaaggcaagcctgcggccaaaggggagaccggcgccaccgccggcaaggcgcaaaaggtcggttcatgaacctgtcgcggctgtttattcttcgcccggtagctaccacgctgagcatgctggccattgtcctggccggcatcatcgcgtaccgcttgttgccggtgtcggccttgccccaggtggattacccgacgatccgggtgatgaccctgtaccccggcgccagcccggacgtgatgaccagcgcggtcaccgcgccattggagcgccagttcgggcagatgcccggcctgacgcagatggcctccaccagttccggtggcgcgtcggtgctgaccctgcgtttcaacctcgacatcaacatggacgtcgccgagcaacaggtgcaggccgcgatcaacgccgccaccaacctgttgcccaaggacctgccggcgccgccggtgtacaacaaggtcaacccggcggataccccggtgctgaccctggcgatcacctccaagaccatgctgctgcccaagctcaatgacttggtcgatacgcgcatggcgcagaaaatcgcgcagatcagcggcgtcggcatggtcagcatcgccggcggccagcgccaggcggtgcgcatcaaggtcaacccggaggccctggcggccaacggcttgaacctgtccgatgtgcgcacgctgatcgctgcatccaacgtcaaccagcccaagggcaatttcgacgggccgacccgtgtgtcgatgctcgatgccaacgatcagctagtctcgcccgcgcaatacgccgaactgatcctggcctacaacaacggcgcgccactgcgcctcaaggacgtggcgcagatcgtcgacggcgccgaaaacgaacgcctcgccgcctgggccaacgaaaaccaggccgtgctgctgaatatccagcgccaaccgggcgccaacgtgatcgaggtggtggaccgcatcaaggcgttgctgccgagcatcaccgacaacctgccggccggcctcgacgtgacggtgctcaccgaccgcacccagaccatccgcgcctcggtcaaggatgtgcaacacgaattgctcatcgccatcgccctggtagtgatggtgacgttcctgttcctgcgccgggtcagtgccacgatcatcccgtccatcgccgtgccgctgtccctggtgggcacctttggcgtgatgtacttggccggattctccatcaacaacctgacgctgatggcgctgaccatcgccaccggctttgtggtggacgatgccatcgtgatgctggagaacatttcgcgctatatcgaggaaggcgaaacgccgctggccgctgccctcaagggcgccaagcagatcggcttcaccctgatttccctgacgctttcgttgatcgccgtgctgatcccgctgctgttcatggctgacgtagtcgggcgcctgttccgcgaattcgccataaccctggcggtggcgatcctgatttccctggtggtgtccctgaccctcacgccgatgatgtgcgcgcgcttgctcaagcgtgagcccaaggagcaagagcaaagccgcttctacaaggccagcggcgcctggatcgattggttgattgcgcgttacgggagcatgttgcagtgggtgctcaagcaccagccgctgaccctgctggtggctatcgccaccctgggcctcaccgtattcctgtacctggtggtgcccaaggggttcttcccggtgcaggacaccggcgtgatccagggcatttccgaggcgccgcaatcaatttccttcgccgccatgagccagcgccagcaggaactggccaagatcatcctggccgatcccgccgtggaaagcctgtcgtcctatatcggtgtggacggcgataacgccaccctcaacagcggccgactgctgatcaacctcaaggcccacggccagcgtgacctgagcgcggcccaggtgatcacccgtttgcaaccggaaatcgacaagctggtgggcatccgcctgttcatgcagccggtgcaggacctgaccatcgaagaccgtgtgagccgtacccagtaccagttcagcatgtcctcgccggacgccgaactgctggcgttgtggagcgacaagctggtgcatgcgctcagtcagttgccggaactcacggatgtggccagcgacctgcaggacaaaggcttgcaggtgtacctggtgatcgaccgtgatgcggcctcgcggctgggtgtgagcgtgtcgaccatcaccgatgcgctgtacgacgccttcggccagcggcagatttccaccatctatacccaggccagccagtaccgcgtggtgttgcaggcccagtccggcgaaacccttgggccggacgcgctgaaccagatccacgtgaaaaccaccgatggcggccaggtgcgcctctccagcctagcccacgtggaacagcgccaggcgcagttggcaattgcgcatatcggccagttcccggcggtgatgatgtcgttcaacctggcccccggcgtcgcgctgggcaaaggcgtggagctgatcaaccagacccagaaagacatcggcatgccggtgggcgtgcaaacccagttccagggcgcggcccaggcgttcgaagcgtcgctgtcgagcaccttgctgctgatcctggcggcggtggtcaccatgtacatcgttctcggtgtgctctacgagagttacattcacccgatcaccattctctcgaccttgccatcggcggcggtaggggcgttgctggcgttgctgctcagcggcaatgacctgggcatgatcgcgatcatcggcatcattttgttgatcggtatcgtcaagaaaaacgcgatcatgatgatcgacttcgccctcgacgccgaacgcaaccagggcctcgacccgcagactgcgatctaccaggcggcgctgctgcgcttccggccaatcctgatgaccaccctggcagcgttgttcggcgcggtgccgttgatgctggccaccggttccggcgcggaattgcgccaaccgctgggcctggtgatggtcggcgggctgctggtgagccaggtgttgacgctgttcaccacgccggtgatctacctgtacttcgatcgcctcggccgccgctggcgcaaagagccgcaaagcctggagccggttgagtcatgaacctgtccggacctttcatccgccggccggtcgcgaccatgctgctgagcctggcgatcctgttgctcggcggcgtcagcttcaacctgctgccggtatcgccgctgccgcagatcgattttccggtgatcgtggtgtcggccagcttgcccggcgccagccccgaagtgatggcgtctaccgtggccacgccgctggagcgctcgttcggcgcgattgccggcatcaccaccatgagcagttcgtcgagccagggctcgacccgggtgatcctcgcgtttgactccgaccgcgacatcaacggcgcggcgcgggaagtgcaagcggcgatcaacgcctcgcgcaacctgctgcccagcggtatgcgcagcatgccgacctacaagaagatcaacccgtcccaggcgccgatcatggtgctgtcgctgacctcggacgtgctgcagaagggccagctgtacgacctggcctcgaccatcctgtcgcaaagcctgtcccaggtgcccggcgtcggcgaagtgcagatcggcggcagttccttgccagccgtgcgcatcgaactggaacccaaggccctcgaccagtacggcgtggccctcgatgatgtgcgcaacaccatcgccaacgccaaccagcgccgacccaagggttccctggaagacagcgagcgcaactggcagatccaggccaatgaccagttggaaaaggccaaggactacgagccactgctgattcgctaccagaatggcgcagccttgcgtctgggtgatgtggccaagatcagcgatggtgtggaagaccgctacaacagtggtttcttcaacaacgactcggcggtactgctggtgatcaaccgccagtccggcgccaacatcatcgagacggtgcgacagatcaaggcgcagttgccggcgttgcaggcggtgttgccgtccagcgtcaagctgagcctggccatggaccgctccccggtgatcaccgccaccttgcatgaagccgagatgaccttgctgattgccgtggggctggtgatcctggtggtgtacctgttcctgggcaatttccgcgcctcgctgatcccgacgctggcggtaccggtgtcactggtgggcaccttcgcggtgatgtacctgtacgggttctcgttgaacaacttttcgctgatggcgttgatcctggccaccggcctggtggtggacgatgccatcgtggtgctggagaacatctcccggcacattgacgaaggcgtgccgccgatgaaggcggcgtacctgggcgcccaggaagtcggctttaccttgctgtcgatgaacgtatcgctggtggcggtgttcctctccatcctgttcatgggcgggattgtcaccaatctgttccgcgagttttccatcaccctgtcggcggcgatcattgtgtcgctgattgtctcgctgaccctgaccccgatgctctgcgcgcgctggctcaaaccccacgttaaaacgcagatgaccggtttgcagcgctggagccagaagatcaacgatcgcatggtctccggctacgccaccagcctggactgggtgctacgccatcggcgcctgaccctgctcagcctgttgctgaccatcggcatgaacgtggcgctgtacgtggtggtgccgaaaaccttcatgccgcaacaggacaccgggcagttgatcggctttgtacgcggtgacgacggcctgtcgttcagcgtgatgcagccgaagatggagaccttccgcaaggcggtgctcaaggacccggcggtgctcagcgtggccggcttcattggtggcaacaacggcaccaacaacgcggtaatgctggtacgcctcaaacccatcagcgagcgcaagatctctgcccaggcggtgatcgagcgtctgcgcaaggacgtgccgctggtgccgggcgggcggttgttcctgatggccgaccaggacctgcaattcggtggcagccgcgaccagaccagtgcgcagtattcctacatcctgcaaagcggcgacctggcggcactgcgcctgtggtacccgaaagtggtggcggccctgcgcgagttgccggaactcaccgccatcgacgcccgtgaaggtcgcggtgcggcgcaggtcacattgattgtcgaccgcgaccaggccaagcgcctggggatcgacatgaacatggtcacggccgtactgaacaacgcctacagccagcggcagatttccaccatctacgacagcctcaaccagtaccaggtggtgatggaggtcaaccccaaatacgcccaggacccgatcactctcaaccagatgcaggtgatcacgtccacgggggcacgggtgccgttgtcgaccattgcccattatgagaacagcctggctgacgaccgcgtcagccacgaaggccagttcgcttcggagaacatcgccttcgacatggcgcccggcgtgacggtggagcagggcacggccgccatcgaacgggcgatcgccaaggtcggcttgccggaagatgtgatcgccaagatggccggcaccgccgatgccttcgcggccacgcagaagggccaaccgttcatgatccttggcgcgctggtggcggtgtacttggtgctgggcatcctgtacgaaagctacattcacccgctgaccattctctcgaccttaccctcggcgggtgtcggcgccatgctcgccatctacctgacgggaggcgagttcagcctgatctcgctgctgggcctgttcctgttgatcggggtggtgaagaaaaacgcgatcctgatgatcgacctggcgctgcaattggaacgcaatgaccgcatggggccgcttgaatcgatccgcagtgcttgcttgttgcgcttgcggccgatcctgatgacgaccctggcggccatcctcggcgccttgccgctgctgctgggtgccggcgatggcgcggaaatgcgccgtcccctgggcctgaccattatcggcggcctggtgttcagccaggtcctgaccctttacaccaccccggtggtttacctttatctcgaccgcgcgcgccatcgcttcaacgcctggcgcggcgtgcggaccgatgctgccctggacactgcgctatgaccgattcaacctttgcccgattggccctgttccggggctcccgcgtggcgagcctggtgctctgcggcgtgttgctcagcgcctgcgccgtcggccccgactacaaacgcccggacgtggtcgagccggcgcaattcaaggaagccaaggggtggcgccaggccacccccagtgattccctggcccgtggtgcctggtgggagttgtacggcgaccgccagctcaatgacctggtgctgcgcctgaacagttccaaccagaccgtggcccaggccgaagcgcgtttccgccaggcccaggcgttggtgcgcagttcccgtggggcgttttaccccaccgtcgacctgagcgcggggaaaacccgggccagccagggcaccggcagcagcagcgcgagcctgagcagttccagcagcggcattcgcgacaccctcaacgcacagttgggtgtgagctgggaggcggacatctggggcaagttgcgccgtggcctggaggccaacgaggccagcgccgaagccagctcggcggatttggcagcgatgcgcctgagccagcaatcggaactggtgcaaagctacctgcaactgcgcgtcatggatgaacagacgcgcctgctgcaagcgaccctggagacctatcagcgctccctgcaaatgaccgaaaaccagtaccgcgccggtgtttccggcaaggacgcggtggcccaggcgcaaacccagctcaagaccacccaggccagcctgatcgacttgatctggcagcgcgcccagctggaaaacgcaattgcggtgttgatcggcgaggcgccggccaacttcaacctggcggtcagcaaagacatcccggcactgccgcagatcccggtgagcctgccgtcgcaactgctggaacgtcgcccggacatcgcttcggccgaacgctcggtgatcgccgccaactccaatatcggcgtggccaaggcggcctactacccggacctgaccctgagcctggccggtggttattccagtagcacctacgccgactggatcagcctgccgaaccgcttctggtcggtggggccgaagctggccatgaccctgttcgatggcggccagcgctcggcggaagtcgaccgcaccgtggcctcctatgacgaaaccgtcgccaagtaccgccagactgtgctggatggtttccgtgaagtggaaaactacatggtgcaactcaaggtgctggaggacgaggcggtggtcagcaacgaagcgctggcggcagcacgcgagtcgctgcgcctgacccagaaccagtacaaggccgggctgattgcctacctggatgtggttaccgtgcaagccacggcgttgagcaacgagcgcacggtgctgaccttgctgcagacgcgcctggtggccagtgtgcaactgatcgccgccttgggcggcggctgggatggacagacgccgattgccgacaaaaattaacgatgaactcgatccaatgagcgggcttgctgtagtgagcgggcttgccccgcgctgagccgcgcagcggccccaaaaaacgggagcgctacgcactccagcgcggggcaagcccgctcaccacaataggtccgctcaccgccatatttgacctcagcaaaccctcgtttctgagccataggattggcgtcaaaatgccactaatggcgctctgataattaatcaactgttcaagaattattctcgctacaatcgcccgctttgccatttcgcacgggcctctcgggccctttgtgcacgagaagtcccatgctcatcggtagttattcgccctcactggtcgtgatctcactgttcgtcgcgatcctcgcttcctacaccgcgctggacctttccgggcgcatcgccaccgccaaaggccgcgccgtctatatatggatcattggcgggtcgatggcgatgggggtgggggtgtggtcgatgcacttcatcggcatgctggctttgcgcttgccgtttgccctgggcttcgacctggggattaccgcgctgtcgttgctgattgcggtgctgtccagcggctttgcattatggctggtcagccaaccgcgcctgccggcctggcagttggggttgggtgcgctgatcatgggcaccggcattgccagcatgcattacaccggtatggcggcgatgcgcatgacgccgggcatcgactacgacccgacgttgtttggcgcttcgttattgatcgcggtggtggcctccggcgcagcgttgtggatcgcccataatttgcgccgcaatacgccgtatgtgcgcctggcccgtggtggagcggcggtggtgatggggtttgctatcgtcggcatgcattacaccggcatggcagcggcccgctttgccgatgaaagcttctgcggcgcggcactgaacgggttgagcggcaagggtctggataacctggtgctggtcaccaccctggcggtgctggccatcgctttactgacttcgttgctcgacgcacgcctggaagcgcgcacggcggtactcgccgactccctgagccaggccaaccaggagctgacccacctggccctgcacgacatgctcaccggcctgcccaaccgcaccttgctcgccgaccgcatccagcaagccatgcaggcggtgaaagagcagggcggctgctttgcgctgatgtttatcgacctggacggcttcaaaccggtcaacgatgcttttggccatcatatgggtgaccagctgttgcgcgaggtcggcctgcgtctgcgtgaagacttgcgcagccatgacaccctggcgcgcatcggcggcgatgagtttgtgttgctggtgcaattgacccagccggacgacgccctcggccttgccgaacgccaagtggtgctgatcaaccgtgcgttccaggtggccgagcatgagctgaagatttccgccagcgtgggcatcgccattttcccaggcaacggcaacagcccccaggaactgctgatgaacgccgacgcggcgatgtaccacgccaagggcgtgggcaagaacggctacagctttttcgatgcgtcgatgaacaccaacgcgcgcaagcaattgcagttgttgcaggacttgcgcaatgccgtcgagcaacaacaattccgcctgtactaccagcccaagttcgacgcggccagtggcattgcggtgggcgccgaagcgctgttgcgctgggagcatccacagcagggcctgttgttgccggcaacctttatcgaactggcggaaaagaccgggttgatcatccccatcggggaatgggtactggatgaagcctgtcgccaaatgagcctgtggtacgcccagggctacgaagattggcgcatcgccgtgaacctgtcggcgctgcagttctgccacgccgggctggtcaagagcgtggccgaggccctggaacgtcatcggttgccggccaatagcctgaccctggaaatcaccgagaccaccgccatgagcgatgccgatgcgagcatgacggtgttgcagcagttgtcggacatgggcgtcgatctgtccatcgatgacttcggtaccggttattccagcctgatgtacctcaagcgcttgccggccaacgagttgaagatcgaccgtgggtttgtgcgcgacctggagcacgacagcgatgacgccgccatcgtctcggccattgtcgccctcggccaggccctgggcctgcgaattgttgctgaaggggtggagaccgatgtgcaacagagctttctcacgcgcctggggtgtaactccctgcaaggttacctgctgggccatccgttgccggcggacggattcatggccgacatccagcgtgccgaagacgcgcttgcgcctgacaaaagccgtgcgtgacgggtattcttggatccagccctaaacatcaggttgaatcaggagaccgcacgcatggacaaagtcgtcatcatcaccggaggcagtcgtgggatcggcgccgagacggcagtgctggccgctcgccagggttaccgcatctgcatcaactaccagtccgacgaagaggctgcccaccgtgtgctcgaacaagtccgcgcgctgggcgcccaggcgattaccgtgcgcgccgacgtgagcattgaagatgaagtgattgcgctgttccaccgcgtcgacaccgaactgggccgtgtcaccgcactggtcaacaacgccggcaccgtgggacacaagtcccgtgtggacgaaatgtccgagttccgtatcctgaaaatcatgaagaccaatgtgctggggccgatcctgtgtgccaagcacgcggtgctgcgcatgtcgcccaagcatggcgggcagggcggcagtatcgtcaatgtatcgtcggtggcggcgcgcctggggtcgcccggtgagtatgtcgactatgccgcctccaagggcgcgctcgataccttcaccattggcctatcaaaagaagtggcgggtgagggcattcgcgtcaacgcggtgcgccctggctacatctacaccgacttccatgccctgagcggcgacccggaccgggtcagcaaactcgaatccggtatccccatggcccgtggcgggcgcccggatgaggtggctgaagcgattatctggctgctgtcggacaaggcgtcgtatgccactgggacgttcctcgatctgggcggtggccgctgaagtccgggcattcatgcgcccaggtttcttagcacctcgtagccctgttccgcaaaggccaccagcaagcgtgcctccgagtttttacgggtggaatagcccgcattgtgaaaaccgttgattttgccatcgcggctttcgctgttgcccactgtgcggtcattcacgttatccagaaagttgaccacccgagccaggttgtaggctgcatcggcgcgcgaacgggcgctgggattcgcggaagtccagtcacccaattgacgtttgagcaggtcggtagtggggtagctgtctcggcgccgtaatagatgtttgaccgccggattggcgttgataatctgtttggcgctacggtggtcgccggatggtcgaccttccgggtggttgggagcattgcgccaattctgctccgtgaggtgtagggtgattgcagggctattgttggtgtacatgaggaactcggtatcaaggagaagtcactggttggcatcatgccgggttaggtcccagtgactgtgttacaactaaaacgaccgcacaatccgccccaacgtctccatcgccttttccgacgcctcggtccacgggctaccgtagttcaggcgaatgcagttcctgaagcgctgggtcgccgagaagatcggccccggcgcaatgctgatgccctgcgccagggccatctggaacaacttcaacgaatccgtctgctccggcagctccagccacaggaagtacccaccggccggttggctgacccgcgtctgtgccggaaagtagcgcgcgatcgccgccagcatggcgctttgctgttcttccagggcatagcgcaacttgcgcaagtgccggtcatagccgccgtgctgcagataatcggcaattgctgcctgggctggcatggaggggcacagtgacgtcatcagtttcaggcgttcgaccttctgcgcaaaacgcccggccgccacccagcccacgcgatagccgggagccaggctcttggcgaaagaaccgcaatgcatcaccaggccatctgtgtcgaaggccttcgcgggtttaggggcctgttgcccgtaatacagttcggcgtacacatcgtcttcgatcagtggcacctgatgctcgcgcagcagttccaccagcgcctgctttttcgcctcgggcagcgtcgcgcccatggggttctggaagctggtcatggtccagcacgccttgatcggatagcgctgcagggattgcgccagggcgttgaggtcgatgccgtcgcgcgggtgcaccgggatttccacggccttgagtttcaaacgctccaacacttgcaggcaggcgtagaacgccggggcttcgatggccaccaggtcgcccggttcggtgacggcttgcaggcacaggttcagggcttccagagcaccattggtgatcagcagctcctccatgggcagcatcaggccgccgaccatgtagcgcagggcgatttgccgacgcagttgcgggttgcccggcgacatgtcggtgaccaccaggcgcgggtccatttcgcggctggcgctggccagggaccgcgccaggcgcggcaacgggaacagcatcgggcttgggaacgccgagccgaagggcacagtgttagggtccttgatcgagtcgagcaccgagaacaccagctcgctcacatccacttcggtggactcatgcacttgctcgctcaccaccggctcggaaaacgggctgggcgcgtgggtgttgacgaagtagccggaacgcggccgtgcacggatcaggccacggcgctccagcaggtaataggcctggaacaccgtagacgggctgacgccgtaggtctggctggcatagcgcaccgagggcacccgctggccggggccgagcacgccggagcggatcagttctgcgatgtcgtcggcaaatttttcgtagcgtttcatgaggacctgattagcctttcaaatgtgttttcagcggttcagcggtgccacaaagcggctgtcggcagcactgtagatccacggctcgtccacatccgagaccttgaagcgcaaggtctgcgagctgctcgccggtttgtccgccagcaatgccaccgacaccggcacgtcgctgatttcccccggtgccaggctgatctcggtcttgccctgcaactggaagccctgcgcgtccaccagttccagacggtagtcctggcgctgctgggtcttgttgatcaccttgaggctgtagatgttttcgatcaggccctgtgcgttttcgcggaacatgccacggtccttggtcacgtccagcgagaccatcggccgttccaccaaggccaccaccagggctgcgatcatcaccagcagcaccgcactgtagccgatcaggcgcgggcgtagcaggtgggtcttgccgccttgcagttgatgttcgctggtgtagctcaccaggccgcgggcgtaacccatcttgtccatgatcgaatcgcaggcgtcgatgcacgccgcacaaccgatgcattccatttgcaggccgtcgcggatgtcgataccggtagggcagacctgcacgcacagctggcagtcgatgcaatcgcccaagccgacatcggcgggtttcacttcacgtttgcgcgggccacggtgttcgccgcgagccgcgtcgtaggaaatggtcagggtgtccttgtcgaacatcacgctctggaaccgcgcatacgggcacatgtgcatgcacaccgcttcgcgcaaccagccggcgttgatgtaagtggcgccggtaaagaacagcacccagaacaggctgacgccgcccatctgccaggtcagcagttcgctggccagggggcggatcggcgtgaaatagccgacaaaggtcagcccggtcagcacactgatgcctagccacaaggtgtgcttggccgagcgccgcgccagtttgttcaagctccagggcgcggcttgcagtttgatgcgctggttacgttcgccttcggtgactttctcgcaccacatgaacagccaggtgaatgaactttgcgggcaggtgtagccgcaccacacacgaccggcgaacacggtgatcgcaaacaggccgaaagcgcaaatgatcagcaaggccgacagcaggatgaagtcctggggccaaaaggtcgcgccaaagatgtggaatttgctttcagccaggtcccacagcaccgcctgccggccaccccagttcaaccagaccgtgccgaaaaacgccaggaacagcaagcccgcgccgctcacccgtaaggtgcggaacaggccagtgaaactgcgggtatgaatcaggttgtcgctggatttggccttcaccttctttgggtgtatgggctcaaaggtttccacggttgggattctttcgctcatggtcgttcgctcatcagcctccatcaggccgatgaactatgcgcgggacactgtttgcataacagactcaggtagagtgataaaaagcggatcagatgggctgcgtgcggcgtgctgcgacaatgtgctgcaccctgtgtcgcctagagtgcagcgctgcaacgtgtgtgttgatacagatcaatcaaatcagcgaaccaggtttttcggcctttacatgctggcgtccatcgtgggccccggcgaccgtcagggcgtcggcctcggcttcagtgatatagatccgctcggcggccaactccacgtaggacatggatttgtcggtgtcggtcgcgatattgacccgcgtcgctggcacgctctgttcctggccgttgtcgtcgagcatgaagtagcacagttggttttcgatacgaatgggcatgccgatctcctttctcgtggactatgcaaggttaggggccggcgatgtgcaggggttccaggcaactgactggcggtcgccgctgtccatcctttaccaataacgataaaggacggcatccatggacgcctggtggcatgaagtgtggcaaaccctgctggctgaattcgccgacatcggcgacgccaggcagcttactcagatcaccgtgcgcctgctgatcgccgcagtgctgggcggtatcctcggctttgaacgcgagagcaagggcaaggccgccggggtgcgcacccatatgctggtggcgttgggtgccgcgttgtttgtgatggtgccgcagatgtccggaaatcaggcggacgcaatgagccgggtggtgcagggggtgatcgcgggaatcgggttcctcggtgccggcaccattctcaaaggcaatgaggatgaagagggccagcacgtcaaaggcctgaccacggcagccgggttgtggatgaccgccgccattggggtagcggcggggttgggacgcgagtcgaccgctgtgctcagtactttattggccctggtggtgttcaatgtgatgccgaggattgtcaagctgctggagaagaaaactgggtaacaaggtctggtcaggtgaccagattttgataacgcagctcgccaaacaccttgatcaccatagggggggttccgggatcgttcgccacgatgagcacgcttgtccgggtgctcggcaggtaatggatttgcatttcaccacgggctccagaaaatttttccaccaggtgcaatggcgtgttcagctgtttttggatgttggtcaggtcgattttgtcgttgttgttaaagtttttgatttcgctgggcgcattcaatggggactcgctgagcgaaccataacggtaggttttggcgtcagcgttatagggtgtattggcaggtgatgagcgcagcgtcgcgttcaactgtgtgcccatctcctcaatttttttggctgttgcctcgattctggaaaatttttgcttgaggtcggcaaggccattttgtgcgttgttcatgtacgcaacgctatcccccaccccgtcgctatcaaatgcctttgcaatctgagagaaattgtcgagctcgatttgttgtatatgcctttctctcatctcgttgatgacttttttggcctgtgcggtgatcttgtcatgggacaactggttgacggatgcccaaggcgtcttggcgtttgccgccgagtgaggggtgttcatcgcgatttcgttcgcaagcttcttggaccgttcaagtaattccttgctttggttggaatctggttcgcgcaacatcttttcgatgttggtttcggtcaacagtgtttcaagttcgctcgccgcgttgcgcgcctcgggcccagaagatgctcgaggtgcgggtgtgttcggtgccggctcgggctgtttgtggggcatggaacaattggggccagactttagcagcccattgatacgctcagacgtcagcccaggttggccgggcgtggagttggatagtgtgggctgcacgccgggcgatgagcggccctgctggggatagatagtcgacattgattcatcctcgtgaggcttgtggttgcacgatatagccaaggcggtggttatgcgccctcgcgggatgagtgtaagagtgagtggcatcgctagagcttaggacgggtctgacagctgagtgggaatttttacttttctcaaccgttcgcccgtgcgcctgaagcaatgtctgcgcacgagcgagccctccacttctgacaatgttcagacaatcaccggcggcatcgttgttggcggctcctccaccgacggcggcgggttttccggtggctctttttccggaatcggttctggctcggtcggtggcaaggtcgggttatcgatattcgggtccggggtttcagccgggatcgggatattcatcggtgtggcctcctttgtgctttgctctatcggtggacacccgccagggcgaattgattccccgcccaatggcggcacatccacctgaacttttaaccggcacgcaggctcggacctatgacggctctgctcagggagagcgctgccgtatcagaatttcggatcaagcaaagagcgtccacagggcgtaaggggaagatgctcgatgactgctgaaacacaggttccagacccatccttattgccgctgtcccaggcgctgttgctgccacggatcgcgatcgaaagcaccacccccgtgatcgacggcggcgaatttgccgtcaaggccgtggtcggccagcgggtcaacgtcaccagcaaggtgttcgccgacggccatgacaagctggccgtgctgatccgctggcgcccgttgcaagacgaaagttggcacagcgtggtcatgaacgacgtgggcaataatggctgggagggcgcgtttaccgtggcccagcaaggcccccacgagtactgcatcgaagcctggatcgacaccttcgccagcttttgctacgaactgcgcaagaagcacgaggccggtgtgccggtcagcctcgagctgcaagaaggccgcagcctggtgctgcaggccgccgagcgcagtgacaacgagctgcgcgaccgcctgatgctgctgcaccacgaactctccgggctgctggaaaccgagcaggttgcgcagttcctgcacgaagacagtgcacatttgatgacccaggcagatcaccgcgcctacctgagcatcagcacggtgtacccgatcgatgtggagcgcgaagcggcattgtttgccagctggtacgagctgttcccgcgctcgatcactgacgatcctgcacgccacggcacctttaatgacgtgcattcacggctgtcgatgatccatgacatgggcttcgacgtgctgtactttccgccgatccaccccattgggcgcagccaccgcaaaggcaagaacaactcgctgaccgccggccccgatgatccgggcagcccgtatgcgatcggcagcgaagagggcggccatgaagccattcacccgcaactgggcagccgcgacgacttccgccgcctggttcaggccgccgccgagcacggcctggaaatcgccctggacttcgccatccagtgttcccaggaccacccatggctcaaagagcatccgggctggttcaactggcgcccggacggcacgatcaagtacgcggaaaacccgccgaaaaaataccaggacatcgtcaacgtcgacttctacgcggcggatgcgatcccgagcctgtggaccgagctgcgcgatatcgtggtgggctgggtggaagagggcgtgaagacctttcgtgtcgacaacccccacaccaagccgctgccgttctggcaatggctgatcagcgatgtgcgcgcccggtaccccgaggtgatcttcctggccgaggcgttcaccacgcccgcgatgatggcgcgcctgggcaaggtcggctactcccagagctacacctacttcacctggcgcaataccaaggccgagttgagcgagtacctgacccagttgaatgaatcgccgtggcgtgaatgctaccggccgaacttcttcgtcaacacaccggacatcaaccctggcttcctgcacgagtcggggcgcgcgggctttttgatccgcgctgcgctggcaaccatgggctcgggcctgtgggggatgtattcgggttttgaactgtgcgaagcggccccggtgcccggcaaagaggaatacctggattcggagaaatacgaaatccgtccacgggatttcaccgcccccggcaacatcatcgccgagatcgcccagctcaaccgcattcgtcggcagaacccggcactgcagacacacttggggctcaagctctacaacgcctggaacgacaacatcctgtatttcggcaagcgcagcgaggatggcagcaacttcattctggtggcggtcaacctggacccttacaacgcgcaggaggccaacttcgagttgccgctgtgggaattggggctgccggacgatgcccagacccagggcgaagacttgatgaatggccaccgctggacctggtatggcaagcaccagtggacacggctggagccgcagatgccgttcgggatctggcgtatcaccacctcttaagccccgcgcggtcaatgtgggaggggcggtgcgacgattcgacttgcccccgattgcggtgtgtcagccacagcttcatcaactgacacaccatcatcgggtgcaggtcgagtcgtcgcactgcacctcccacattgaccgagtggttcaagtatttcaggagtttccaatggcgaagaaacccaacgctgccaccttcatcaaggacccgctctggtacaaggacgcggtgatctaccaggttcacgtcaaatcctatttcgactccaacaatgacggtatcggcgactttcccggcctgatcgccaagctcgattacatcgccgacctcggcgtcaacactatctggctgctgccgttctacccctcgccacgccgcgacgatggctacgacatcgctgaataccgaggcgtacacagtgactacggcaccatggccgacgccaagcgcttcatcgccgaggcgcacaagcgcggcctgcgggtgatcaccgaactggtgatcaaccacacctccgaccagcacccctggttccagcgtgcgcgcaaggccaagcccggttcggctgcgcgggacttctacgtgtggtcggatgacgaccagaaatacgacggcacgcgcatcatcttcctcgataccgagaagtccaactggacctgggacccggtcgccggccagtacttctggcaccgtttctactcgcaccagcccgacctcaacttcgacaacccgcaggtcatgaaagccgtgctgtcggtgatgcgctattggctggacatgggcatcgacggcctgcgcctggatgcgatcccctatttgatcgaacgcgatgggaccaacaacgaaaacctgcctgagactcacaacgtgctcaagcagatccgcgccgagatcgatgcccattaccccgaccgcatgttgctcgccgaagcgaaccagtggccggaagacacacagctgtacttcggtgacaaaaagggcgacgacggcgacgagtgccacatggctttccactttccgctgatgccgcgcatgtacatggccctggcccaggaagatcgcttcccgatcaccgatatcctgcgccagaccccggagattcccgccaattgccagtgggcgattttcctgcgcaaccatgatgagctgaccctggaaatggtcaccgacaaagagcgcgactacctgtggaactactacgccgccgaccggcgtgcgcggatcaacctggggattcgccgccggctcgcaccgctgatggagcgcgaccgccgccgtgtcgagctgctcaacagcctgctgctgtcgatgcccggtacgccgaccctgtattacggcgatgaaatcggcatgggcgacaacatctacctgggtgaccgcgatggcgtgcgcacgccgatgcaatggtccatcgaccgcaacggcggtttctcccgggccgacccggccagcctggtgctgccgccgatcatggacccgcaatatggctatcagtcggtcaatgtggagacccaggcccaggacccgcattcgttgctgaactggacccggcgcatgctggcggtgcgcaagcagtccaaggcctttggccgaggcagcctgaaaatgctctcgccgagcaaccggcgcatcctggcctatacccgcgaatttaccggtgaggacgggcgcaacgagatcatcttgtgcgtggccaacgtgtcgcgcagtgcccaggcggcggagctggacctgtcggcgtttgccgggatggtgccggtggaaatgcttggcggtaatgcgttcccgcccatcggccagttgaatttcctgctgaccctggcgccctacggtttctactggtttgtgctggcgccggaaaaccagatgcccagctggcatgtggaaccggctcagagcatgccggacttcaccacattggtattgaaaaaacgcatggaagaactgctggaagaaccttgccgagcgtccctggagcagaccgctctgccagcgtggttgcccaagcgccgctggttcgctggcaaggacacggcgatcgacagcgtgcgcattgcctacggcgtgcgatttggcgacgcgcagcatccggtgttgctcagtgaagtcgaggtgacggccgcaggccaggtcagccgttaccagttgccgttcggtttccttggcgaagatcaattcaccagcgccttgccccagcaattggcgctggcccgagtacgtcgggtgcgccaggtggggttggtgaccgacgccttcagccttgagcacttcatccgtgcggtgatccagggcttgcaggcgggcaccgtgctggagaccagtgacggcgagctgcgctttgctgccacaccgcatttggccaagctgcaactgacggatgaggcggaggtgcgttacttgtcggccgagcagtccaacagctcggtggtggtgggcgagagcctggtgctcaagctgatccgcaaagtcgcctccggcgtacacccggaactggagatgagtgcttatctgacagctgcgggctacccgaacatttcgccactactggggtcgatggtgcgccacgacgccgagggcgaggacaatctgctgatgattgcccagggctacctgagcaaccagggcgacgcctggagctggacccagaacaacctggagcgggcgatccgcgacgaactggccgaggccatttccgagcaggaacaacactacaacgccctgggcgagctggccgattttgccggcttgctcggccagcgcctcggcgaaatgcaccaggtgctcggcgccaaaactaccgacaaggccttcaaacccgaagtcaccacggccaaggacacccaggcctgggccaaggatgtcggcgcgcaactggaccgtgcgctgcacttgctcaaacttcatcaaagccagttgaacccggcggatcaagtgctggtcagtgatttgctggcacagaaaaaagccatcgccagccatgtacaggctttggcgaaagccacggcgggcgggttgcgcatccgtgtgcatggtgacttgcacttgggccaggtgctggtggtgaagggcgatgcttacctgatcgacttcgaaggggagccggcgcggccattgcatgagcgacgtggcaagcacagtccgtacaaagatgtgagcggtgtattgcgctcattcgactatgcggcggcgatggccctgaatgttcaaggggtggatcactcgcccgaggcggaccaggcgcgcagacgcgtgacagagcgttacctcaaggaagcacgccaggcctttatccgggcttatcaggcggcgacggctacactggcgcatgactggcaggatgccaaaggccaggacgccgcgctgacgttgttcagcctggagaaggccgcgtacgaagtggcttacgaagcagaaaaccgcccaacctggttgccggtgcccctgcaagggttgcacggattgttgagcggtatcgcacctatatcgaacactgcacgcggtggggagacgtcatgagctttacacataaagaaccgctgcaaccgaaactgactgcattgccggcgtccaaggacgtcgaagcgctggtccgcgccgaacaccacgacccgttctcgattctcgggccacacgatgatgatcacggcggccagtttatccgtgcattcctgcccgaggccttgagtgttcaggtgctggcccgcgacagtggcgaggcgctcggcagcctggacgcgagccaggtgccgggcctgtttgtcggccagttcaagacccgtcagccgtacctgttgaaaatccagtgggctggtggcgagcagattaccgaagacccgtacagcttccagcaactgctgctgggtgagatggacctgtacctgttcgccgaaggtaatcaccgcgaccttggcagttgcctgggcgcccaggtgaccagcgtcgatggcgtggcgggcgtgcgctttgccgtgtgggcgccgaatgcgcggcgggtgtcggtggtgggcgacttcaatatctgggacggtcggcgtcatccgatgcgcttgcgccatccttccggcgtgtgggagatcttcatcccacgcctgcaaccgggtgcggcctacaagtacgagattctcggtgcccatgggatcctgccgctcaaggccgacccagtggcgctggccacccagttgccgccggacactgcctccaaggtggccgaaccgttgcaggtggactggcaggatcatgaatggatgcaggcgcgggtcgataagcagaaggccaccgcgccgttgtcgatctatgaactgcacgtgggctcctggcagtgcgagttggacgaggcgggcgaagtggcccggcaatacaactggcgtgagctggccgaacgcctgattccctatgtgcagcaactgggtttcacccacgtcgagctgatgccgatcatggagcatccgttcggcggttcctggggctaccaggcgttgtcacaatttgctcccacggcgcggttcggttcgccgcaggatttcgcctacttcgtcaatgcgctgcaccaggccgatatcggtgtgatcctcgactgggtgccggcgcattttcctaccgatacccacggcctggcgcaattcgacggcactgcgctgtacgaatacgccaacccgctggaaggcttccaccaggattgggacacgctgatctacaacctgggccgcaccgaggtgcacggcttcatgctggcttcggcgctgcactggctcaagcatttccacattgacgggctgcgcgtggatgccgtggcgtcgatgctctaccgcgactattcgcgcaaggccggcgaatgggtgcccaaccgccatggcggccgtgagaatctcgaagccatcgacttcctgcgccatctgaacgacgtggtggcccaggaagcgccgggtgcgttggtgattgccgaggaatccaccgcctggccgggcgtgagccagccgacccaacagggcgggctgggcttcaactacaaatggaacatgggctggatgcacgactcactgcactacatccagcaggacccggtgtaccgtgcccaccatcacaacgaactgagtttcggcctggtgtatgcctggtccgagcggttcatcctgccgatctcccatgacgaagtggtgcatggcaagcactcgctgatcgacaagatgcccggcgaccgctggcagaaattcgccaacctgcgcgcctatctggcgttcatgtggatgcatcccggtaagaaactgctgttcatgggctgcgaattcggccaatggcgcgagtggaaccatgaccagcaattggactggtacttgttgcaatacgccgagcacaaaggcgtgcaaaagctggtgggggacttgaaccggctgtaccgcgaagagccggccttgcatgaacaggacgacgcaccccagggcttccagtggctgatcggcgatgacgcgatcaatagcgtctatgcctggctgcgctggagcaaggacggtaagccggtgctggtggtggccaacttcaccccggtgccgcgtgagggttacgccgtcggtgtaccttttgctgggcgctggagcgaagtgatcaacagtgacgccgatatgtacgcaggttccaattacggtaatgggggcgaggtgttcacccaggatgagccccgtcatggtcaagcggtgtcgctgtcgctgaatctgccaccccttggcgtgttgattctgcgtccggaagcgctttaaaggctctactgtgctggattctgttgtccacgctactggcagggtgccacaatggcgcctttgtcgtagcagtcgaatcgggcgaatttcatgaatggccttgggcgtgggcaggaccaggattgctttatagaggagcaggtgcggactgatcgtttgcaccagctgttccggcagtcatttgccgccatcttcggcagctacttgggcgccatgatgctctgctggctgtgttgggaccgctttgatcatcaagtcatgctgatctggctattgacgctggcagcctcgacgttgctgcgactgcagatgttcatggagtggtttcgttgccccaacgccgagcgcaccccggatcgctgggagcgccgctactggaccacgctgatgctgtcggccggtatctggggctttggcgcgttggcggtgatgcccaccgatgaccggctctcccaggcgctggtgatgctgttcaccgtgggcatgtcggtgagtgcagtgtcgtgttactcggcctatcgctatatgacgctggggtccatgggcctggttttactgccatgtaccctatggttgctgttccagccttcctctatgcaggtgggtgtggccgtcgcggtactggtgttttccacctttgtggtgagcgccacgcgcaagttgtccgatgccctggaaaaagcctttcgcctgacccggcaaatggagcgtgcccacaacatttccactcgcgccgcacagaccgatgaactcaccggcctgatgaatcgccgcgcctttttcgagcatgcccaggtgttgtacgaacaatgccgccacaatcgtcagccgctgtgtgcgctgatgatggacatggaccacttcaaggaaatcaacgacacctacggccaccaggccggtgaccaggtgttgcgccagattggcggggtgatcagcgcttcgttccgccaggctgatgtgtacggccgcctgggtggagaagagtttgcggtgctgctgcccaacacttcgctggaaaccgcacgggttatcgctgaacagttgatcaaggcaatctccggcctgtcctccgcgccggtgcatgggttgacggccagcctcggtgttgcgtccacccacactcaggatcaagacctgcacggcctgatgaatacggctgacaaggcgctgtatcgcgccaaggcccagggccgcaatcaggtggcggtggcggagtaagacttcaaattgtagcaagcgggcttctttggcaaccaggcctggtcgctagggcatcgccttggtcagtgcccgcgccacctgatcggccgagtagggcttggcaaggaactcgaacccttcgtagccgctgtcggccaactcttcgctgtagccggaagtcagcaccaccggcaagtccgggcgccgctgacgcagtaccttggccatggccacgccggtcatgccgggcatcaccacatccgaaaacaccccatcgaaggccagggcatcggcgccggccagggtcagtgcctgttcggcatcggtggcccaggtggtgcggtagcccaggtcctgaaggatctggttggcgaagcggcccacttccaggttgtcctccacgatgaggatatggcgctgcgctgcggtgtggaccggcgcaagatcttcctgctgctgcacgttgggcattgtttgcggggccacttccggcaggtacaaggtaaacaccgtgccctggcccacgcggctggccacgtcgacgttgccaccggactgcttggcaaacccgaacacctgggacaagcccaggccagtgcctttgccgaccgccttggtggtaaagaatggctcgaaaatgcgctcgaaggtatcgcccggaataccgctgccggtgtcggtcagggagacgctgacaaatggctggagtgcctgcgcatcgccgcggatgcacggcagtgcctcgagcgtggcgacgcgcagggtcagggtgccctggccgtccatggcatcccgggcgttgagggcgatgttgatcagggcggtttcaaactggctggagtcaacccgcacatggcaggggcgctctggcaattgcacctgtacgcggatgcgtgcgccggtgacgctttcgagcatctcggcgatgttcttgacccgctggcccgcatcgaagacttccgggttcagcggttggcgacgggcgaaggcgagcaactggctggtgagcttgctggcccgttccaccgtatcggacaccgcccccatgtaacgctggcggcgttcttcggacagcccaggctggcgcaggaagtccaccgaggaacgaatgatggtcaacaggttgttgaagtcgtgggccacgccgccggtcaattgaccaatggcttcaagtttctgggactggtgcaacgcagcttcggcctgggtgagggccgcggtgcgttcctgcacccgttgttccagtgtggcattgagttcggtgaaggctgccaggccttcgcgcacggcggcgtcagcgcgcacgcgctcgatgtgcgcccaggagcgctcggtgacttcgcccaccaacgccaggtcgtagggtgaccaggcccgaggcgctttgtcatgcacggccatcaacgccgtgagacggccgtgcttgatcagcgggaaacacacggtggccaatgcgcccaaggcctgatagctggcggcgtcttcaggggtgaactcgaggcgattgtcttgcaccaccagcggctcgccggcgcgcaggcgttgcaccgccaatgcgccgaacgaggccaggctgtaatggccgacgatgctcggcgagccgtgcgctgcccagttgccgcgaatggtaaaaccgtcttcgtcggcatccatgtcggcataggcgcagttggagacttgcaggtgctcggccagcaggcgggtggtggtggccatgatgtgttcggcatcggtggcggtggcgaccgcgttgccgatggtgtccagggctgccaggcgctgggtgagaaacacggtggtggtggtttcggtgaccgtgtcgagcatgccgacgatcttgccattggggtcccggatcgggctgtagcagaacgtgaaatacgcctgttcaggcccggcaccacgctcgatcaccaaggggaagttttcgatataggtcgcgtgcccttggaaggccgcgtcggcgatcgggctgacctggtcccagacttcgtgccaggtttcgctgaacgggcggcccaatgcgtcgggtttatcgcccaggatcggaataaacgcgtcgttgtagagcgtgatcaactgtggcccccagatgatggcctggggaaagcttgaggcaaagcacagtgcggccgtggtcttgagcacatccggccactgttccagcgggcccaggggcgtactcgcccaatcatgctggcgcacccgctcagccatctcgctgctgctttgcagccaattcatcattgcaagaacaccttgtttaccgcggtctgtttaacgcctggaagggagggcctgacaagcaacagaccggaaagcccgctggcagttcagcgggattatcgcggtgatagcaatttgatgcactatccgtatggatagatctgcaaacctgcttattgcgcgccgaaaaccgccgtccaataaatccctgcgtcactcttcgggtccatcgcataggccgcgcccagttcgcggaactgcgggttcatcaggttggcgcaatggcccgggctggcgagccaaccgtcgaccaccttgcgtggcgtgtccaggccggcggcgatgttttcgccgatgttcttcgcgatgtacccggccaactccgcacggtcgcccggtgtgcggccgtcgtggtcgaggtggtcgaagaagttgccgttggccatgttgcgcgtgtggctgttggcggcgccggccaggtcgtcattccacgacaacggcgtggtggcggtaaacgcctgggtgccgcattgccgtggctgagaccgcgcggtgttgatcaggttgagcagttgcctgccttcggtctgccagtcgcccaggccactggtcagcagcgggcgagcaagcacgatgcgccagtcctggccgctgttgctcacgccgatatcaacaaattgcgggtccagcaccacgcgacagaagctttcgcgcacggccttcatcgccgcctgggcatccttgggcccggacaggctgatggcctgcacgttgaccatcgggtacgcggcgcgtgccagcgcttgctgcaagtcgcccacattggtggccggcagcaccagccgtgtgtcgctggccagcggtggcagttcctgggaaccctggtcgccgcagcgctgcacctggctgcggtattggttgatctgttgtaccaactgactttcttcattcgccatcgcgctggcgcagaacaccgtactggcggccagcgtcgtaagacccatcatcaatgacagaacgcgcatggacgttacccttgagcttgaaagtgcccatgatgcgcgatgtaacccggtctggcgcaacgccttttttgtttttttgcctcaatgggtgttctggaggccgttacaagcgctgaagcgacgccatgccatcacactggccagcaggatcaaccccagcgccacgctgaacgtggtatgcaggccataggccacggactggggcagggcgcgggtcacgtccgggctggcccaggcgaacacggcacccagtacggacgtgccgacgatcaacccgagattgcgtgacaggttcagcagccccgagacagtgcctcgctgcgagctgtccacattgctcatgaccgccgtgttgttggcggcctggaacaggctatagcccgtcgtcaaaacgaccagcgaggcaaggtaggcgatcagtccggaccccagcgacaacaacagcgcaccacaggccagcactcccagcccggcgagtgtcacgcgttggctgccgaagcgatcggtgagacgtccggccggtacgccggtgaaggccgcgacacaggggccgagcgccatcgccaggcccatccactcagggtcgaggtccaggccgcgggacagatagaacggcccgaccacaaaggtggccatgatcacggcggcgaccaaggcactcatggccaggccggcgcgtaacgttggcgccttcaggaaggaccaggaacctcggcctatggacgatggcgcgcaggggcgatcaaccggcaaatactggtaggcgattgcggcggccaccgatcccagtggtatgccgacgaggaagatagcgcgccagccccacacactgagcaacaggccccccatgcttggccccatggcggtacccacggctgacattgtgccgagcaagcccatgacccggccggtacgctccttggtcaccgtatcgccaaccatgcccagggccatggccatcatgaccgccgcgcccaggccttgcaggatgcgcgcggcaatcagccattcaagtgccagcgccatgccgcaaagtccacaggccacggtgaacagtaccaacccggcgagcaacaatcgccggcgccccaggcgatcacccaggcgcccggcactcacaatcaccgcggtgattgccagcaagtaggccaacaccacccactgcacggcgtgaaacgaggcatcaaacgcgtgcgccaggctgggcaagccgacgttggcgatgctggtgccgagggaggccagcaacatggacagggacaggctgacaaggctgccacgggaagacgtgcgcatgggtaattccttgaatgaacgcaactgtcacaaatctacggcgtggcctaacatggcggaagacgcatgagttgcagttaatacctgcatgcaacgcctgataaggagcgccgatgcccgatctcaacctgttgatcaccctggatgcattgctcgccgaaggcagcgttgcggcggcggccaaacgcctgcggctgagcgcatcggccatgagtcgcgccctggcgcgtctgcgcgagaccaccggcgacccattgctggtgcgcgccgggcggggcctggtgccgacgccaagggcggtggaactgcgtgaacaggtcagtcgcctggtgcaggaagcccacgccgcgctacgccccgtgcaatcgttggacatggcccaggtcgagcgcacctttaccctgcgcaccagcgaagagttcgtcgagaatgtcggcccggccctgttggcgcgcatcgccggggaggcgcccggcgtgcgcctgcggttcatcaacaagaccgacaaggacagtgcaatgctgcgcgaaggccgtgtcgacctggaaaccggcgtggtcgaccccagcgccagcccggaactgctgacccaggcattattccgcgaccgtctggtgggcgtggtgcgcagtggccatgccctcagccagggcacggtcagcgccgagcgttacgctgcgggccaacacgtctacgtgtcccggcgcgggcaggaccgtggccagattgacgatgcgctggaagccgtgggccttacgcggcagatcagcaccatcgtcgccggtttcgccaccgccatcgccctggcccgcgacaccgacctgatcgccagcgtgccagagcgctacaccacccatcaacgtgcaggcctctacagctttgcgctgccgctgacgctgccgggctttaccgtggcgatgctctggcacccccggctggatgccgacctggcgcatcgctggttgcgtgggtgtttgcgtgaggtatgcgccgaacaggtacaatccgcgctgccttgacgctgaaccccaggaatttgcatgtacagccttacccgctacaccacaccatgccccgagccgatcaacagccagatcctgcaactggtggtggataacctcaccgacatcagcagcgtagcgctgccgccgagcaacctgctgtacaacatctaccaatacgccacgggctttgaagtgcacctctacctggaagcgctcaacggtgccaaaggcattgcggtcgagttggtggtggcgatggacggcgaaaagctgatgggcttttgcctgtacctgcccgtgaaggatgatcccgaggcctgcggtgtggcgttcatggcggtgcaagtcggctatcgccgccagggtgtggcccgcgcaatgatgcgtgacgtgctgagccggtatccccatgcggaactggcgtgctcagtggagaaggtgcccgcatttgagggcatgggctttcaagtgcgtggtgcacggggcacccaggtgttgatgaacacccggcactacggcaccgacggcctgatgggcgtgctggatgtggcagcgatctacagctcgctggaggtacggcagattcatacgtacctgctgcaaaagcatggcaagcgcgccatggtggacgcggagaaacagcgtgatcggcacctcgatcaactggcgcgcaaggtgcggttgtttgttgacgggcgttgagtgaaccttttttgtggcgagcgggcttgctgtggcaagcctgctgactacaacccgccctcgcttatggctttttcaggctccagttgccgccgccgtgccggttattccttcgacacgcccacgattgaccatcgccaggatggtcgccaacaactcctgctgcgcctcttcacggctgatctcaccactggccgccgcttgggacaacgcctccgcagcccccagcattgcccttagacccgcctgggaaatccgtccgaacggcgacagcgcatcgcggcatttatcgagaaagatcgcctcgtactggcgcttgagcgtctcaagctccggcgagctgctgagcgcggcaatcacccccggaatttcccgaccctgcaacagcacgcagtccacataggacgcggcgatcacccaggcacgatcctcaagcgtggcgctgctggcctcgatggcgtcgacaaacacctggttctggcgcgcatcgaaatcctcgtacagcgcggtcaacaacccggcgcgagtgacgaaatggtcgtagaccaccggcttggtcacgcccgccaactccgccaggcggccgagagtcagggcgtcggtgccttcatcgcgcaccagttgccaggcgacttcaagtaattggcgcaggcgatcttcacgggacaggcgacggcgtggggcaggggatgcagggcttgacatgcttatataccaaaagtaacttactaatcgtaacttaagcccagcctaaccctaaacgggagtttttgtcatgcatgcgttgattgttgttgcccatcacgacccgcaatccctcacccacagcgttgccgcgcaggtggccgccggcctcggcgcatccggccacacgttcgagatcgccgaccttgccgccgaaggtttcgacccacgctacaacgccgctgaccatgcggtccaccgcaaccgcgccacgcctccggccgacgtgctggccgaacaggcgcgcctcgatcgcgccgacgccctggtgctggcgttcccgatttattggtggtcgctgccgggcttgctcaagggctggatcgaccgcgtgttcgtcaatggctgggccattgagtacggccccgatacacctgtggtgaaaaaattgcgacacctgaaagtgcacctgctggccctgggcgcagcggatgacgatgcctttgatcggcatggctatgccaaggcgatgcgcacgcagatcgactacgggatttttgattactgtggcgcgcaggtggtgacgtcagaattgttgctggagtcggaaagcggcggggcgcaggcgcacctcgacaaggccagggctgttgggcggggactgttcgaaaccgaggcggttgccggttgattcaaccttcgcgaaacaggtcgtgggcgtccagcaggcggtaggcgatttccgggcgtttttccaggcctctgcggattgctgccgggatcgattggcgggtcttgcgacacatccccggcaaatcgtcgatgacgatctgaatcccgcgcatgctcttgacctcggtatggccaggtgcgatatgcacgcggatgcccagttgctggtacatcagctgttgcatgcgctccaggtcctgcaggctcttgaggtcttcaagacggtcgagcagcttcttctcttcctggcgcgtgagctggaggatgcgctggtcggcgcccggcgtctccagcagctgttcgcggtcgcagacgcaggcgccgggtgggcagggttggcgaatgatcatgtgcagagcctccccattccgacgctgacgctttaatagctcagttggaccccaagactgcccagcgccttccagtactcaggataggtcttggccacgcagtccgggtcctggatgcggatacccgaaaccttcagcccggccagggcaaagcacatggcaatgcggtggtcggcgtgggtgtcgatcagcgcggtgcacgaggtgccggccagcgcaggatcactggctaccaacaggtcatcgccttcgatggtcgccaagcccgggcggatttcgttgaggccgtcatgcagtgcctgcacacggtcgcactccttgacccgcaggttggccagctcggtgaaacgcaccggcgtgttattgaacgccgcgagcactgcgagggtcgggatcgcgtcctgcatctgcgagccgaccactgtggcctgcatgttcggaaactgtgcgatcacggcctgggccttggcgtccggctgggtgaagtcctgcgccgccacgccgatgtcgatgcggcctccagtcaacacttgcgcggcccacaggtaagtggcggcggaggcgtccggttcgatcagatagtcgtgggcggtgtagccggtcggggccacgcgccaggtggtgtcgtcgaccgcttcaacctgggcaccgaaggcgcgcatgcagtccagggtcaggtcgacatagccacgggcaccgatgtccttgccggtcagcgccacttcaatcggcgcttcgccgcaggccgcaagcatcagcagggccgacacgtactggctggacaggccgccgtcgatctcgaagcgcttagccttgatcttgcccacgccgtgcacggtgaccggcgggcaaccggtcgggctgtcgaccaggatgccgttctggccgagggtcgccagcaacgggccgatcgggcgtttttgcatgtagtcgtcgccggtcaacaccacggtgccttcgaccgtggccacggcagcggtgagaaaacgcatggcggtaccggcgttgccgaggaacagcggttgtaccggcaggtgcagtttgccgtggccggtgacgacgaaggtggtgtcgtccggctcatcgatggtcacgcccatttggcgcagggctaccgacatatggcgcgtgtcgtcactcttcagcgcgccgctgagacggctggtgcccttggccagggccgccagcaacagggcacggttggtaatggatttggagccggggggcgcgaccttgccattgagggggaagttgggcggtgtaacggtcacggttttctgcgaactcaaggtacagggctcctgatcaaggcaaggtcggcgggcggacccgaataatcggccaaagcggcggtgcttgtcgagcgcgcggtcgcagacgctgaaatttactgggcggtgtacatcaattccaattgtaggagctggcttgccggcgatggcggccttacggtgtacatatccgtctctttggtaacggcggctattggttccgctcttacagcggctcacttttgatagagcgcaaaagtaagcaaaacgctcctgccccaacactcggcacctcgcctaggctcggtgtgcccgtaattcgacagtgatttggggggccgccaccacgcgccatccatggcgcggggcggctaaaccggcatccctgccggtttaccccccaaatccctgccgaattccggccagcgtgtttgacggggcgcctaagatcaaaatcaaaagccagagcacagcggcctgagagccggcttgagtggtgtaaagcaaaggcgaatgcaaacgcggaccctgtaggagccggcttgccggcgatgcaggcgcttcggtccttcagatacacctatcgctgtgccaaccaataatcatgcagcgcccgcgcagccggttcgatttcactgacgcgctgctggtgcgcctgtacatccaggtcggccggcagttcgaaattgtcctgctcggcgcaccaggaaatcttctccaactgcgcagcctgtgcggctggcagttccggccagttaccgatggcggcgccacggatgtagccaaagcaccattcttcggcgagggtcacggtgtggccctggtgttcggtttcgtcgaagcgcgccttgaagcctgtggcgtcggtggccagttgcccggccagggtgttgatatggcgtacgcacagttcgaggaagcgttgcgcttcgtccatgttgtcccattccgggttctggccgccccagattgccgggaaccactccgccacgtccacctgcaccgggctggacaccagcgcggtgaagtagccgtcgagttcggccaggttcagcaccgaatggtcgtcgccgtatttaagcaaagtgtcttcgatgaactcgaattcagcggcggtgaggggttgggcgtgcatgggcatatcctttaaacgtcgagcgccgcgaatggggcggcttaaagcgcgaaggatggcgcttgggcccagccctttcaaggtctttaggtagaacaggcgataagtaccctgtggcgagcgggcttgtcccgcgttgggcggcgaagcagccctgaaacccgcagccgaagagtacctgacgcaccgcattcttccttccagggtcgcttcgcaacccaacgcgggacaagcccgctcgccacaattgccgtgttcacccttaatgggagggcgtcagtcagatatggccggcttttttccagcagtttccatgcgttggcacagcttgctcacgcacaccgcgccgaccaccgcgaggatgatcggcaccaggaagtcatggtctatgcgggtgaattccgccaccagcacaatcgcggtcagtggcatgctcatgctggcggcgaggaacgccgccgcgccgatgattgcaaacgcaccgaggggcacgccgggccacaccaggctccaggtgccgccgaggatgatcgccagtaacgcgccattcgccaggccgggggtgagcaggccgccttcggccccggcgcgcaggctgctgctggtgatcagcactttgaccaccagcaacagtgcggccaggccgatggtcagttcattgtcgaaacccaattgcgcggggcctttgccattgccgaggatttgcggcagcagcatcgccaggccgccgataacgctgaagttgatcagcgccagtaccggcaggcgccagcctctggcggcgtttgcccttgctgcgccggtcagccgggtgaaggcataggccgccacgccgaataccggcccacacaccacggcccaggcgatcagcaccgggctcagcacaaaatgcggcaccacgtactgcgcctctgcccccagcccgatccacgccaccgctgcaccaatcgccgaggtcgccagcgcaatcagcgccgccggccaactgaatgcgcccaccagcacttccagtacaaacaccgcgccgcccaacggcacgttgtacacagccgccagcccggcacccgcgccgcaggccacgatcagtcggtgcatgggcggttcgagtcgggcgcgttgggacagccaggtggcggccagtgcaccaacctcacggggcgccacttcacgccccagcggcgagccgagagccacggtgatgatctgcaaaagcgcgtgggcgagggtggttttgggcggcatgattggcatctgttccgacaccgcctgcttgatgctcaccagcgggcgcccgtagcgatagagcgtccaccagcccaacccggcgaccaggccgcacactaccaacacctgcaaacggcgctccggcgcggcggcggtcacgccccacaaaaaggtttcatggctgaccaggctgtcgaggctgtaaccgtacgccaggtgctgaataccgtgcagcagcagggccaggagcatgccgcccaggcctgcgccaataccggtcaacaccaccaccagggcaagaatcagcgacgaacgcaacgtggacggcatagacggctccaggcaagggccctgattgtatagccgataagccgggcctccgggatgaaatgtatcggggctgcatgaaccttgcgcccacaacattccattacgtttgcccgtcccgtttttggccgatgtgccgtcacacacacttgttatagttcgggccttatcactcgccagtcagggatcactgccatgtccgaataccaagctttcgtcgtcgaactcaccggcaacgttgcccatgtgcagatcaaccgcccggaaaagatcaacgcgatgaacgccgcgttctggaccgaaatcatcgacatcttccagtgggtcgaagacaccgacgccgtgcgcgccgtggtaatcagcggcgccggcaagcatttctcctctggcatcgacctgatgatgctggcctcggtcgccaatgactttggcaaggatgtcggtcgcaacgcccgcctgctgcggcgcaagattctcgaactgcaagcctcgttcaacgccgtcgacaactgccgcaagccggtgctggcggcgatccagggttactgcatcggcggcgccatcgacctgatcagcgcctgcgacatgcgctacgccgccgaaggcgcgcaattctcgatcaaggaaatcgatatcggcatggccgccgacgtcggcaccctgcagcgcctgccgcgcatcatcggcgacggcatgctgcgcgagctggcctacaccggtcgccagttcggcgccgaggaagcgcgcagtatcggcctggtcaatcgcgtctatgccgatcaggacagcctgctggccggcgtcatggagattgcccatgaaatcgccgccaaatcgccgattgcgctcaccggcaccaaggccatgatcagctacatgcgtgaccacacggtcaatgacggcttggaatacgttgccacctggaactcggctatgttgcaatccaacgacctgcgcgtggccatcgcggcccatatgagcaagcagaaacccgaattcgtggattgactgacatgaccccaggctggattaccacaacgctgctggacaacgacacccctggcggctgggccgtcgcccgcagccgcgacggctttttgcatgacaccaacggcccgttgtttccccgggaatggctcaagcgccaggacctgtcggtgtttgccgaacacggtatcggccacctcgatggcgagccggtgtacctgctggaactcgatgcggcgggcgaagtgccgggctgcagttggcagggcctgcgcggcttcatgctgcaaggcgatcacaccctttacaaagtgctgggctatgcggcgcagatcggcacctgggcacgtgagcaccggttctgtggcagttgcggccaggccatggtccaggtgccacgggaacgcgcgatgcactgccaggcctgtgacctgcgcagctacccacggatctcgccgagcatgatcgtgctggtgacccgtggcgacgagatcctgctggcgcgttcgccacgttttgtcagcggggtctacagcaccctggcggggtttgccgagccgggtgagtcggccgaagactgcctgatccgcgaggtccgcgaagaggtgcaggtggaggtcaagaacatccagtacatgggcagccagtgctggccgttcccgcattcgatgatgctgggctttcatgccgagtacgccggtggcgacatcgtgccccaggccgatgagatcgaggacgcgcagtggttcaacatccacgacctgccgccgttgccggcgtcacgttcgattgcgcgttacctgatcgacctctacctggcccgccgtctaggccacgctgaaccagtgctgccaggctaggcgcacggtcaggccgaggaccacggtgatgaacaccgggcgaatgaatttggcgccaccgctgattgcgctgcgggcgccaaagaacgcgccgcacatcaccgaaacgcccatggccaggccaacgatccagtccaccgaaccattgatgatgaacaccgtcagcgccgccgcgttgctgacgaagttcatgctgcgcgccacgccgctggctttgaccaggtcgatggggtgcagcagcatcgtgctcaccgtccagaacgctccggtgcccggaccggcaacgccatcgtagaagcccaggccgaagccctgggtggcctgccatttcttcttgatcggcgcgtcggcatccagcggcgccttgggtgtgccgccgaacagcaggtacacgccacaggcgaacacaatcaccggcagcatcttgttcagggtctcggccggcaggtagtgagcgacgacggcgccggtcagtgcgccgatcagcgtgccgacgatggcgtgcacccattggcgcgggtggaacagtttgcggcgatagaaggtaaaactcgcggtggccgagccgaaggtggaactgagcttgttggtacccagtaccaaatgcggtggcatgccggcggtgagcagggcgggggtggtcagcagaccgccgccaccggcgatggcgtcgatgaaaccggcaatgaaggcaaccaccgccaggatggcgagagtggtgaggtctacgctgagttcgaagggcatgggcagggcttattcttggcgggcgctatgcgaaaggccgccatcttactcgcggggactcagcaaatccaaatgtgggagggggcttgcccccgattgcggtgttccagctaactcatctgtagctgattcaccgctatcgggggcaagccccctcccacattgttactgcgtcgacttacgatcgatgtgtgtcgatccactccagcgccgtacgccagatacaaattccgaggaaatacgccgacatcaccgaccacaacccaaacgtccacgggttggtgttcgggtaatccaccaccatcaggaagctgcacagcaaccagatcgtggtcaccgcgatattgatcggcatgaaccgcttcacccggaacggatgcaggaacttcatcggtgtcacggtcagcagggccaggccgatcacggtgagcaaggtgacccaggcttccggctggatgatatacacgcacagcgccaccacgttccaggcggcggggaagccgacgaagtagttgtccttgctcttcatgttcacgttgcagaagcagaacagcgacgacaccaggatcaccgacactgtaaacaggtgggtgaagtccggcaggtcgatatagcggtagataaacagcgcgggaatgaacacataggtgaggtaatcgatcaccaggtccagcaccgagccgtcaaagcttggcaataccgtgctgacattcacccggcgcgccagtgaaccatcgaccccgtccaccaccaatgccaggcccagccacagcaggcaggccttcggcgagttttccagcagcgccagggtggccaggaaggccaataccacgccggtggcggtaaagccgtgggcgccccaggctttgagtctggctacatgcagggtcgatatcacgggcggttctccaaaaggtgaaacggggcagccgacaacgtgacgccgtcgagtctggccggggaatgcaggtatcgaccgggaagggggtaagaaggttcaccgccccggcgtatcacttagcgtagcaagcgtaagacgtttcggcatcagccctggcggaacaccagggccttcaagccactttgcgggtcgatgtcgggaaactccggtgggtttgccaggcgttcaacgaagtgcaggcccggtgcttcgcgggtgacgccgtcgatcaggaaatcttcgccgaaggccgggtcgttcatgcacgccagcaccgtgccctgcggcgtgagcaaatccggcaggcggcgcagcacgcgttggtagtccttggtcagcaggaagctgcctttctggaacgagggcgggtcgatgatcaccaggtcgtaggggccgctgttggtcactttggcccaggacttgaacaggtcatggcccaggaaactcaccttgctcaggtcatgaccgttgagacgatggttgtcgcggccacggctcaaggcgccgcgggccatgtccaggttcaccacatgctcggcgccgccttcgatggccgccacggaaaacccgcaggtgtaggcaaacaggttgagcacacgcatgcccctggcctgttcgcgcacccaattacggccgtagcgcatgtcgagaaacagcccgctattctgtttcttgcccaagtcgatcaggtagcgcaagccgccttcgacgatgatttgctcttcgacgggctcgcccgccagccattcggtggtgctttgcggcaggtagcggtgttgcagggcaacggtataacggccgaactggctgtgcagcagctgtttcaaggcgtccagttgcgcagcgtcgggctccttgaacaacgacaccagcagcacgccttgcagccagtccaccgtcagttgctccaggcccggccagcagcgaccacggccatggaacaggcggcgggtttcgctcggtggcgtttgcagggcggcgagcaaatgagcgtgcagggtggcgagtgcgtctgggttcatcgttaaacgtcagtcattgagcgggcggcattttaaacacagttgcagggtcgtgggtggcttgagcacaacgtgctgcgaaaaagccatggcgcagtgattcatgctcaaaatgctgaaaacagcgcctgataacaggcaaaacatcctccggcgccgacataaactggaaaaaaagcccggaggtgcccatgaacggtttcacgaaagcgctgattgaccagcaagagctggatgaatggcgcgacgccctggcctcactagtggccaacgccggcgccgcacgggcacggcaaattctcgacctgctggcccaggatgccagtgccccgcacatcgactggaaaccgcgccatggcacgccctacatcaatagcatcagcgtcgagcagcagccggcgttccctggcgatctcgctaccgaagaacgcctggcttcactggtgcgctggaacgccctggccatggtggtgcgcgccaaccaggcctatggcgaactcggcgggcatatcgcgagttacgccagcgcggcagacttgttcgaggtgggtttcaaccatttcttccgtgcccgcagcgacggctttggcggtgacctggtgttctaccagccgcattccgcgcccggcatttatgcacgggcattccttgaaggccgcttgagtgaagccgacctggcccactatcgccaggagatcggcgggcccaagggtggcgcacgtggcctgtccagctatccccacccctggctgatgccggacttctggcagttccccaccggttccatggggatcggccccatcagttcgattttccaggcgcgcttcatgcgttacttgcaacatcgcggcttgcaggacaccaccgaccgccatgtctggggcgtgtttggcgacggcgagatggacgagccggaaagcatgtccgccctgaccctggccgcccgcgaaggcctggacaacctcacgtgggtggtcaattgtaacctgcaacgcctcgacggcccggtgcgcggcaacgggcgcatcatcgatgaactggaggccttgtttgccggcgccggctggaacgtgatcaaactggtctggggctcggactgggatgcgttgctggccaaggatgccgatggttcgttggtcaacattttgtccaatacggttgacggccaattccagaccttcgccgccaaggacggcgcctacaaccgcgagcacttcttcggccagagtgactccctggcccggctggtcgagggcctgagcgatgaacagatcgaccgtctcaagcgtggcggccatgacatggtcaagattcacgcggcctaccacgcggcgcggcgggtcaagggcaagcccacggtgatcctggcccagaccaaaaagggcttcggcatgggtgaggccgggcagggcaagatgaccacgcaccagcagaagaagctggatcgcgatgcgttgatcgccttccgcaaccgcttccaattgccgctgagcgatgaacagaccgaatccctgagctttttcaaaccggcagacgacagcgttgagctgcgctacctgcaccagcggcgcaccgcattgggcggttacgtgcccagtcgacgccaggtcgccgggcccgttaccgtgccggcagtagcgggctacgccggtttcgccacggccgccgacggcaaggaaatgtccaccaccatggcctttgtgcgcatgctcaccaacctgctcaaggacaaagccctgggcccacgcattgtgcccattgtcgcggacgaagcgcgcaccttcggcatggctaacctgttcaagcagatcggcatttattccagcgtgggccagcgctacgagccggaagacatcggctcgatcctcagctaccgcgaagccaccgatgggcagattctggaggagggcatcagcgaagccagcgccatcagctcctgggttgcggcggccaccagttattcagtccacggcctgcgcatgttgccgttctacatctattactcgatgtttggcttccagcgcgtcggcgacctgatctgggccgctgccgaccagcgtgcccgtggcttcctgctcggcgccacggccgggcgcaccaccctcggtggcgaaggcttgcagcaccaggacggcagcagccacctcaccgctgccaccgtgcccaactgccgtgcctacgacccggcgtttgccggtgaattcgcggtgatcctcgaccacggcatgcgccagatgctggagcacgatgtggacgagttctactacgtgaccctgatgaacgaaaactacccgcagccgagcctgccggaaggcgtggaggcggcgatcatcaagggcatgtattgcttgcaaggtacggccgacgccaaggtacgcctgttgggttccggcacgctggtgcgcgaggcgcaagcggcggcgcagttgctggcggaggattggcaggtggcgagcgaggtgttcagcgtgaccagtttcagcgaactggcgcgggaagcgcgggagctggaacgctggaatcgcttgcatccgcagcagacggcacgtgtcagccacttggctgaatgcttgcccaagggggcgccggtggtggccgtgtccgactacgtgcgggccgtgccgcagatgatcggttcgtatctggattccagctacaccgtgcttggtactgatgggttcgggcgcagtgatacgcgggcggcgttgcgcgatttctttgaggtggatcggtatcacatcgtgctggcggcactgacggcgttggatgcgcggatgtgtcagctggcgattgagaagtacggcttacagacggagcgtgcggcgtcctggaactcctgacaggcgcaaatcaaaatgtgcgggctggtttttagagggtcgctatcagggccggcccaaacgcttccttgaggaaacctggggcgatatagcgctcgtagtgcgcttcggacagcaggaaaaactcgcggtcgatggcatcccgcaggtcggccagcgggcgctcacgaaactccggcagcaacaccaacccatacgcctccagcctggaaatcacccgcgcgccacgggcaatcagctggtacgcccagcaatatggcgattggtgcggcataaagcggatcttgcgattttccagttgctggcgcagcaggtgcgcgtcgaacacttccagcttgctggccatcacctgcaccagcagttgctccaggcgcaaccacaccgcctgtttttcttcggcgttgtagccgttccactggatcacttcgtggtgatagcgcttgcagccccggcagaccaggtctccgtagacggtggagcacaggccgacgcaaggggtcttgatggtttgattgggcataagaggcaatttgcaaagatttatcgcgcaccgcaacccatgtgggagggggcttgcccccgattgcggtgcatcagtcactgaagcttgagctgaacgaatgtcatcgggggcaagccccctcccacatgtggagtcaatcccagctcagcgcgccgccagtctggtactcgatcacacgggtctcgaagaagtttttctctttcttcaagtccatgatttcgctcatccacgggaacgggttggtggtacctg

SEQ ID NO: 114 - DNA, 714795 bp, Pseudomonas nodulensis
  misc_feature (456123)..(456189): n is a, c, g, or t
  misc_feature (471785)..(471850): n is a, c, g, or t
ccgcaatagaagaagatgccttccagcacgcagtagtaggcgaccaggttgcgcagcagttctttgtcggtctcgacggtgccggtttcgaacttcggatcggagatcgagcgggtgtatttgaggccccaagcggcttttttggccaccgatggaatctcgtggtacatgttgaagatctcgccttcatccatggccagcgattcgatgcagtactggtaggcgtgggtgtggatcgcttcttcgaaggcctgacgcaggatgtactggcggcactccgggttggtgatcaggcggtacacggccagcaccaggttgttggcaaccagggagtcggcggtggagaagaagcccaggttgcgcatgacgatgcgacgctcgtcgtcggtcaggccttcggggtttttccacagggcgatgtcggcggtcatgttgacctcttgcggcatccagtggttggcgcagccgtcgaggtacttctgccaggcccaatcgtacttgaagggtacgagttggttgaggtcggcgcggcagttgatcatgcgtttttcgtcaacggcgacacgggcggaggcgccttcgagttcggcgaggccttcggcgacgtcgagtttgtcgagggctgccttggcgcggacgatggcggcggagtcgttggcggtcacgttacgggcttccagcgcagcagcggcgccggcaccgtcgaggcggtccatgttggcttcgctggcgtggccggcgttggcgcccttgatcaccgctgcaccggtgtcttcgttgtcgacttcatcccaactcagcatggaaatgctccttcctggtattcgaaaaataagtgtttttgcaggcttcaaggcattgaaatactgcgcatagtgtggtcgataaataccgatactgcacactatgtagtggtctgttctgtttgtgggcacactatatggtgtgtaacaagactggtcaacgtgcaggaatcacgcaggcctgctttaaaggctgatcttgatctgcgcgcacaacccaccttccggccggttgctcaacgtcaacgaacccccgatggccaccaccagttgctgggcaatcgccagccccaggccggtgccgccggtgccgcggttgcgtgagctttccacgcggtagaacggctgcatcacctgcaccagttcgtcctcggcaatgcccgggccgttgtcgagcaccttgatcgacagtgcaccatcggccgtcgaaccgacctccagttgcgcggcgccggcgaacttgagggcgttgtccaccaggttcaccagcacccggcgcagggcgtgggggcgcgtgtcgagtacgaccgcgcttttgccgctgaggctcacctgtttgtgcatgtcctggtagtcgaacaccaggctgtcaaggaaggcgtcgaggttgatgcggtggctggcttcggtggcgccgtggacgctgcgtgcgtaggccacgccctcgcgcacaaggtgctccatctcgccaaggtcgctccagagtttgtcgcgttcggcacaatcctgcatgaattcggcgcgcagtttcatgcgcgtgatcggggtttgcaggtcatgggaaatcgccgcgaggatctgcatgcgctccttgaggtattcggcgatgcgctgttgcatggcgttgaacgcaaccgcagcgtgggccacttcggtggggcctttttcgtccagcggcgtggggtgggcgttggggtcgagggtttccacggcgcgcgccaggcgggtcagcgggcggatggccaggcgcacggcgaaccaggtgcagcccagcagcagcgccagttgcagcaccagcaccaccggcagccagtacgcgacgggcagggcggcgggacgtacgtcgagggtgatcgggctgccatcggccagggtcaggtgtgcctggaagtgcttctgcatcccggggatgtcgcggaaggtcagcgcgtagtgttcacccaatgcatcggcaatcgaggtggcggccatgggcacgtcgtcgctgcgcatcggctcgccggtttcgccggcgttgagcaggtagcgatagttttgccggtcgagacgcggcagccaactggcgcgctcgttggcgggcagccggtcaaggatcgccaccgaggtggccacgtcgttttccaggttgcccagcatgacggtgcgcgcgctgatatagcgctcatagaactgcgcactgaaggacaagccatgggcgcacaccaggctgatcaggaagatcagcgacaactgcgacgccagggtacgcggccagccaaaccttaaggtcattgatcggccccgaggatttccaccggcagggagaacacgtagccctcgctgcgcacggtcttgatgtaggccggttcgcgggcgtcgtccagcaggcgttggcgcaggcggctcaccagcaggtcgatggaacggtcgaacagatcggcgtcgcggccctgggtcaggttgagcaactggtcgcggttgagcacgcgttgggggtgatcgaggaacacccgcagcaggcggtattcggcgccgctcagggcgaccagggtgtcgtctgcgtcgagcaggtggcgggcggtggtgtccaggcgccagcggccgaagcggatcagccgcccggtctcgctgactaccaggttcggcggcagcattcgtgtgcggcgcagcaccgcgttgatgcgcgccagcagctcacgagcggcgaacggcttgaccaggtaatcgtccgcgcccatttccaagccgatgatgcggtcggtttcatcgttgcgtgcggtcagcatcaacaccggcgtggctttgtgcttgcccacccgcagctcgcggcacagctgcaaaccgtcgtcgccgggcatcatgatgtccagcacgatcaggtccaccggggtggtatcgaggaagctgcgcatctggcggccgtcggcgaccacggtggtgcgcatgccgttctttttcaggtagttgcccaccagttcgcggatttcccggtcgtcatcgacgatcaggatgtgatcgacatgatccatgctgcctccctcgttaaatgctcgttggggcgcagtctagccattggcgacggacttgccttgtgccctttgtattgcagtgtatctggcgataaggagatacatgacgaggcaaaaataccggcgtgaacgcctacagggtgcgcgaagcccccggcaacagggcttcaaacacttgctgcacctggggatcatcgctgtgggccacgttgaaacgcatggcgtcacggtgcgtcgcgtcatagccaaacagtgtgcttggcgccagcaccatgccctgtttcaaaccttcctgggccagtcgttcgccgttcacgccgggcggaaggagcgcccagataaacatcccgccttcgtagcccatcggcagttcgcagccgcaacgccgcagccattgttcgacccgtccaccggcctccatcaagcgctgcaccatgcgtttgcggtgcctggcgtaactgccttcgctgagcatgtggtacaggagctgctcgaacagctccgaggtcacgccgccactcatcagcttcatattggtcaggttggccgccagttgcggtgccgccaccacgaagctgacgcgggcgttggcgctcaggctcttggagaagcccgacaggtaagtgacctggtccaggccggcgagggctgccaggcggggcggtgggttggggtgcaggtcgccgtagaggtcgtcctcgacgatatggcaagcgtattgctgggtcagttgcagcaggcgaaacgcctggccggggctgaaggtatgaccggtcgggttttgcagcacgctggtggtcaggtacaggctgggacgatgttcggccagcaactgttcgagggccgcgaagtcaaaaccgtcgggacggcgctggatcgtcaccaccttgaccccgtgcagcgccaggttggcgtggaagttgaaatagcacggcgtgtccagcagcacggtgtcgccggggcgcgccagcaggcgcatcaacatgtccaggccttgcaccgtattgggggtagtgatgatctgttctaccgagaccgacaaaccttcgccgtgcagtttctgttgcagcgcctggcgcaacggcagcagcccggccggcgtacccatcccggcgatacgtaacgaaggcgcacgcaccacgctgcgcatggcttggcggatcgcttcgctgtccagccaggcctcgggcaagtgaccaccgccggggcgcaggtcaccgtagaccgtggcaagggggcggcgcaagacgctcaacaggtcctggggcagcaactcgacccaggcggccagggccgggcggacgcggtccgcggcgacgaaatagccgcggccctggctggaggtgagcaggttgcgcccgcgcaggcggtcgagggcttcgttgagggtgaacttgctcacgcccagggtctgggtcagttcacgcaccgagggcaacttgctgccgggtgcccattcgccgttttcgatggcctggctgaacgcctcgacgatctgttgcactttgggggtgccctctacaaaggcgatggccgatacgaacatacagcttccttatctttgccggtgattttaccggtgaagttcgggcggattaggcctcactttacctgccttgcgcaacgccgactgcctagactgcgcgctctattcctcaggtctatggccatgacaagcgtgttgaccctttcgtcgtttctgtacttcctgctgttttgcgccaccatcaccttcagccccggacccatgaccctgctgctcttgagcctgggcctgcgcgacggcctgcgccgttcgatcccggcgcagatcggcgccagtgtgtcgtacctgatttcgatcctggtctttgccgtgggcttctcggagttgatcaagggcaacctggcgatcacccagggcatccagctggtcggcgtcgcctacatcctctacctggcctacaaacagtggaccagcagcggcctggcgctggaccgtgccggtgcggtggagggcgcgcgcagcctgttcggcaagggcttgcttaccgggttttccaaccccaaggccatcatcctgttcagcgcggtgttcccgcagttcgccggcgtgggggggcacagttcggcggtggacattggcattctcgggctgacgttcctgttgctgcaattcgccagcggctgcctgtattgctacttcggccagcgcatcaagcacgtcttggaaaaccccaggcggcgtgtgctgttgcaacgcatcacggctgttttgctgttgggcgtggcgttgatgctggcgcggggctttgcccactgagcttatgagcggtagtggcgaattgccggtgcgctgatagactcctggcattcactcaggatttcccccccccccatgtcagctgcagaaggaaacggacttccgctcgcttcacggctgtacaaatcccgcaccctcgggctgacgctcggttttgtctgcgtggtgttcgggatgtatcccctggaccccgcctggtgggtgtgggcctggatggtgatcaacgcgttcatctggccgcacctggcgtttcaattgaccttgcgcaccaccaacgcactgcgcagtgaacggcgcaacctgctgttcgattccttttgcggtggcttctgggtcggcgccatgcacttcaacccgctgcccagcgtgaccacgctgtcgatgatgaccatgaacaacgtggccatcggcggtccgcgcttcatgctggcggggtggctggcgcaggcgctgggtatcggcgcggcgctgctgatcttcgcgccggcattcattgccgtgaccagccaggcgcagctctacgcctgcctgccgatcctgatgctgtacccgttggccctgggctggatctgctaccgccaggcggtgaccctggcccgccacaagcgtgaactgttggtcctgagtcgcaccgacagcttgtccggcctgctcaaccacggcgcctggaaggaccaccttgagatcgagttccagcgctgtcgccgggattcggtaggtgccgccatcgcgctgatcgacatcgaccatttcaagaccatcaatgacacctacggccatgtcaccggcgatatcgtcctgcgccagctgagcaaagtgctgcgccagaacctgcgcgccaccgaccttgccgggcgttacggtggcgacgagttctgcgtgatcctgccgggcatgccgctcaaccgcgccaccgaagtgatggacgccttgcgcgatcgcttcaacgccttggcctacgcccaggacccgaccctgcgcgccagcctgagcatcggcctggcgccgtatcaaccgacccacgcggattcgaccagttggctcaatgacgccgaccaggccttgtacgacgccaaaagcagcgggcgcaaccgtgtcagtgcggtgcaggagggttggttgcgatcggtctagtggggtagggtgtctcggcacctccaacaaaaaacaaggatcggttcatgctcttcactttccgccgtaccctcctggccgccaccctggccatgtccttcgccgtgccggcctacagcgccgagccccataaacagatccaggcccaatccgaacactacaaggccgacgccctgaaactgctggagcgcctggtcaatatcgactcgggttcaggttatgaaccgggcctgacccaagtgcgcgacatcgccgtggatgagttgaaacagctgggcttctccatcgagctggtgccggacaaggccgccaacaacagccacgtggtcgccaccctcaagggcaccggcaaagccagaatcctgctgatggcccacatggacaccgtgttcaaggaaggctcggccgccgagcgcccgttccacatcaaggacggccgcgcctatggccccggcgtgatggatgacaagggcggcatcgtcgccggcatctacgcgctcaaagtcctcaaggaccagggcttcaaggactacgcgcaaatcaccttcctgctcgacgccagcgaagaaaccggctcggacgccgcctccgagctgatccgccaaaccgccaaggcccacgacgtcaccctgaacctcgaacccgggcgcccagccgacggcctggtggtgtggcgcaaaggcagcgccaccgctgtggtcgaagtcaaaggcaaagccgcccacgccggcgtcgccccggaactcgggcgcaacgccgccatggaagcggcgcaccagatcctgcaactgggcaagttgggggatgctgagaagaaaaccaccatcaacttcaccgtgatcaagtcgggcgaccgtaccaacgtcattcccgaccaggccaccgccaaggccgacgtgcgcgcggcattgccggaagagtttgatcgcatcgagaaagacctggcacgggtatcggccaacaagttgatcccggaaacggaagtgaagaccagcttgcagcgtgggctgccaccgatgccgcagacgccggagtcggacaagttggtggcgattgcccaggggatttatggggaattgggcaggacgttgacgatcgaaggcagtggcggcgcggcggatgccagcttgtcagccggggtagggacgccgacgttggacgggtttgggattgtcggcgggaatattcacacaccggaggagtatgcggaggtggagagtgtggtgccgcggttgtatctgttgagtcggatgattatggaactgagcgagcgctgactgacgctcttttgtggcgagcaggcttgccctgcgttgggctgcacagcagccccaaaacagacaatgccggtttatcagaaaacactcatcgcctggattggggccgcttcgcggcccaacgcgagcaagctcgctcgccacataagcgggtatcgcgtcctttggcaccggttagattttttcatttttaattttggaggttctatttttaagtgttgacacgacatgcctcaaccaagttaggccgtcaggccattcgctgcgataataatagtagcaacctatatcgctgaataaataagcttccagctcttgctctgtctttccgctgcgcattaacttatctagttctgtttgtacttttaatatcgtgtcttcagatgagtcggagacgaaaaactctataacatcgtccgctttttcgtggtcgtcaacccagtcttgattgaagtaaccagcaaaaaactgttgtggttcgggatagtattggttcatgggtttgaaaatccagtatgaattcggtagccagtatgcatgttaggggctttacggattatcaggtaaatttcctttcccgaaacggctgatgtgctgttctttttgaaacttgtacctacgggatgtttggttttttgaatgatgatgatttgattgtttttcccttttaaaaagttatcgattttagctttgttttcatccagtacggtcgatatttcccgctctgctgttgctctgtcatggaaggctgaggcagccgggatgtgtggctcttgttgtggtgagcaggcttgccctgcgttgggctgcgcagcagccccaaaacagacaatgccgatttacctgataaacacccatcgcctgaatggggggccgcttcgcggcccaacgcagggcaagcctgctcgccacagaggggttgtgttgccttggagggcggtgtttggtttaccaggttgactggtcttcgaggctggctttttgaaggtcttctttccagaccttgttggcgagtcgatagatgtcgacgaagaagcctcgggggtcggctatttctgtttcggtccaagccatggttatgtacttgtcgtaatcgttctcaaattctttcgaaaagtcaaagtcggggttgtctagtgcgtctttgagagaagaaatcaatataaaacgatgcctgtaggaaaggtgcataaggtctttcaggacgaaagaaattatgattttttccctgtcttgatgattgttagggtcatgcttccatagctcttttccaaccgtttcctcaaggtcgtatatcgataaggctcctaataaatgagagacattaggagtgtatggtgtgtccatgaatggggatttcagcatggtctgctcacttcgggaaagcggtgaatggtcgagtcggattgtgtcgatcaaatctgatttctgctctgtccatgttttcaatgtatctggggttgttcaagtccccggtattaggtttatagcctcgcccggccccaggcagttcgaccacgaccactgggttgcctgcattatccaaacctgtgggagatggcgaatcgccctgcatcctgcccaaggccttgtttatagcgtggagttgcattttccaagagttaaattgggagctggagctgatatacccgctctccccagtcgttggatttgttccatcaatagatcgttgttttaacgcgctatctggtatctctgggccatgcttttcaaccgtatgcatatcgtattcctgctcccagctcagcacccttcgttttgcatttgcctctgtcagtgcatctattctcgactgtccattagttcgcggtagttgaggtagagcaggtgcgccttcatcgacgttaggcctccgaagggtaggaggaacgttaggtttacactcgtcgccagggcagctacttaagcccagcggatctacccatccggtagggttaggcacgtactggtacgcattgatcccacccgccagcttcaccggatccggcgtcaggtaacggccaacatccggattgtagtagcgatggcggttgtagtgtagcccgctttcctgatcgaaatactgaccctggaaacgcagcgggttgtcgatttttccgatgtcgatgcggctgatttcgccgtaggcacggtaatgcgtagaccagacgatttcgccatccggggcagtgagttcctgtggggtgccgaggtggtcgagttggtagtggtaggccttggtttcctttggaccgaaaccttccaataaagccagcgggcgaaagctgtccggttcgtagaggtagctgcggtgccgatccgcgtggtgttcggcgatgagtttgtcgccttgccagaagagttcggtcgtaatcccatctacggttttactgatacgccgcccaaacgggtcgtagcggtagctggcagtctggccgttgggcgttttaatgccgatcaggcggtgctgacagtcgtagcggtattcggtgacgagggcgtggcctttgccgcggcgttcgcggatgaggttgccgaaggcgtcatagtcgtaatggtggtcgccctggatcatcaggcggttgccggcgacgatgtcggggccggggcggttgtgcatgagcaggttgccggcggggtcgtggccgaagcgttcctgttcgtcttgagtgtggtcggcgcgggtaaggcggttgagtgcgtcgtagtggtagcggtgttcgcctttgcgggtatcgagcaggcgggtgaggttgccggatttgtcgtagtcgtagtggcggcggtagagcgggccttcggcgtcattgatgctctggttgaacaggcgtccctggtggtcgtgttggtagtggctgagcagttggccttgttggcgttgctgttcgcggccggccttgaacaggtgtgaggtaagaacagcgccgttcagttcgacggtggcgaggtggccgcctttgtcgtgattgaaggtgaggcggttgttgtccggcaggcgcaggttttgcaattggccgcaggcgtcgtaggcgtagcgcagcgtgccccagccttggtgttcggcggtgaggcggttttggctgtcgtactcgtaggccagggaccagtggccgtcttctacgcctaagagattgccttggcggtcgtaggcgtaatcgacggtattgccatcgggcagggtttttctgatgaggcgtccggcatggtcgcgctcgtagcgggtaaccagctgactgccgtcatcgccgtgttcggtcttttccgaaaggttgccattaaggtcgtaaacgtaagcggtgcgctggccgtcaaacccggtttcctgctggatcaggccgttgttgtggtactggagccggtaggtctcgccaacttcgttttcgatttcggtcagcagtaaccgcgcgttgtcgtagcggtagttgacctgagtgccatcggcattgatgcggcggctgatcaggtgcaggccgtcggcgtattcgtagcgggtgacgtgcccgagttcatcgcgctcggcggtgatttttccgtaagcgttgtagctgtattcccgatgcgcgccgcctggcagcacaacgcgaatcaaccgacccacgctgtcccactgatactgggtcagcgcgccatgttcatcttcccgcgcaatctgtcgccccagatcgtcatagcgataacgcttgatcccaccattgggcaactgctcctcaagcaactgcccacgctcattccacaccagccgatgacagctgtggtccgggtaccaaaccccaaccagttgcccgtatttgttgtagctgtagtcagtagtgttgccatcagaatcggtcttgcgcgttacatcgccttggtcgttgcgctcatacttccaaaccgcctgaccccgccttacaacgcgtacgaacccgttgtcatgctcgtaggtcgtcggctcatcgtcccccggaaacaccgccaccaagcgcccagcttcgtcgtactgatacgccgtgatcgccccgagcgggtcctgctcaaccgtcagccggcctttttcatcgtaggatttgaaatgctcggccccgtcaggatcaacccgctgcaccagccgcgcccgttgatcgtgaagatagacttcctggctgccatcggcgttaaacaccgtgacctggccgttgtcatcccaggcatagcgcgtgtccatctgcgagaagctggcccaatgccgcacacaccgcgccgccttgccagaccgttcccactcccaatagaaactcgccccaccggccaagtcgcgttcaagaatgacgtgctgttcgtcgtaccgataaacctcgctttcgccgatggcattggtcgcgcaaatcagtcgtccagcttcgtcgtaggtgtaggaaacaacggtctgttccgtcacccactcaaacggctcgagacctttagcccgatgaacctgatagtccaccgccacgatgcggcccgacgcatagcgcaaccaaagcgaacgcccgacaccgttatccacccgctcaacacgccccagaaaatcccgagtgatacgcagccggttgtcatacgcatcgctgatcgccgtcagcacaccgtcgcggaagtggtagaaacgtgacgcctgcgccagcaccagttcatcgggcgcagcacccaaatagatcgccgcttcggccaggctattggtgatcgcaggtcgagaggcagtaggcaagggcagggtggtcgaccgattctcatgatcggtccacaccatcgaatcaccctcaaccaccagccgatgcgccagcgagtgactccagccaaaccccagcccgcaatccattttcaccgcactggtgcggtacaaccgggtccactcaaacggcaagatcccgtccagcgtcccatcggtaagggtcagcaattcctcgccggtgaccatcgacaccgggcagccgttagtggcggtcttgtccgcaggcgccgccgcatccccattcgggtttcgagcagaagccggcacatcatccacaggctcctgccgcaccagcaccgtccgctgcgtggccttatcccgaaccaccggcaccgcgttggcaaccacctgatccccagccttcaacggcacatccggaaccaccctgatcggcgtcgcacgactccccagcagcaacggcctggccgcctcgacatgcgcgtccaaccgaggcccgaccaactgttccgcgagcatctccagccactggcgagcccggccagacttgatgtgactcgtcacctgagcacccaggcgcagggtcacccccatggcgcccgcgaccctcaccaacagcagacctatcaacacgtcgccggtgatttcccccatcacctcgctcatcgcttgcggcggcaacatccgtatccaactgcagatcgccgacaggtagataaacatcaacggctcatcgctgagcacgagcaggccctgggcgatggcgtctttgcccagtttcagcagttcatccagttcggcctgggagacgtactgcagcaacttctggctgttgctctggaggtccgccagcagctcggacagttgtgtgaaattgtcccaaaggctgtaaagcgccttacccattccattaagaaacgccttctccagcagcctgcgttgatcaagcgggctggcgtctgtgtagtctttccactgggcttcgaaggtgtttttccactcctcgcgcaggcgtgcgtccaatgcatcaatcaccgattgataggatgcatacagtgccttgacgtggtccttggaaacgttgggatagaagctgacccggtatggctggtcgcgctcacactcgtcgatttcgagaatgccgctcgggccgatggttttgtggatcggctcgcccagtggcccgccgttggggtcgacacgctgcaacatcaccggcgtgttgccgatgggtacgaactgcgtgctttggaacaggtgcaccagggtcaacttgccgttggcctggcaagtcgcaacggtggtgcttgggtatagagaacgattgatcggcgcgaccagcgccacttcatccccgaccttgaagacttgctcgacatccagcgccgacaggctccaaaagctcgaagcccatgcgtcaaaggtattcaggcattcccggaaatcgcgaaagacgcgctcgatatcgaccgtcttcacatccattggggtcagggccagcctgccaatggccgggttcaagaaacagctccaacaaccagaaagtccatttgcaatccctcgcactgtgtagtcaggcgagggactttgcggaccttttcaggggaggggagtagagcttatccggcggttacgtgggacgtttcgacaacgctcgtcttctctcgccccaacaccaggctgcacagtgccggcaagaacaacagcgtcagcaccgtgcccaccaacaccccaccgatcagcacgtaggccagggacgaccagaacaccgacaatgtcagcggaataaacgccagcgccgccgccagcgcggtcaggatcaccggccgtgcacgccgcacggtggcctcgacgatcgcctcgcgaatggccatgccgtggtcctggttctgacggatctggtcggtgaagatcagcgtgttgcgcatcaggatcccgccaatcccgatcaagcccaggattgcattgaacccgaacggctggttgaacagcagcaaggtcggcaccgctccgatcaaacccagtggggcggtggcgaagaccatgaacatcacaccgaacgagcgcacctggaacatgatcaccgtgagcgtcagcaggatcatgatcgggaacagcgcggccagggcgacgttggccttggcgctttcttccaccgggccgccgatgtcgatctggtagccggccggcagcttggcgatcagcggttgcaggtctttgtacacggccatttccacgtccggcggttgcacgccgtcgatgatgtcggcgcgtacttcgacggtggtcgcgcggttgcggcgctttaggatcggttcttccatcaccgcctggaaatgcccgacctgggccagcggcacggaggtgccggcgctgttggtgagggtcatgttgttgaggttgccgaggtcttcgcgttggctgccctgggcgcgggcgaccacggacacagtgcggttgccttcgcgcacctcggtgatggggttgccactgagcaacgcgttgagctgggatttgacctcgttgggggtgaagcccagcagacgcaggcggtcttggtccagcaccagacgatacccgctggtgcgctcgccccaatcgaggaaggcatccttggtcagcttgttggcggcgacgaccttgcgcacgtcttcggagatgccacgcagcacatccacattcgggccagacacacggaacaccaccgggaacggcacgggcgggccgaacagcaactgcgtgacgcgcacccgtgccgccgggaactcaccggccgcaatccgctcgcgcatgcgcagtttcaatgcatcgcgggcatgggagtccggggtctgcacgatcagcttggcaaacgccgggtccggcagttcagggttcagcgacaggaaaaagcggggcgcaccgccgcccacataagtgtcgaccatcgtggtttgcggctcttgcagcagggctttttccagctgtgcggccaccgcttcagtgcttttgaaggcactccctggcggcatgtacacctcaagaatcagctcggaacggtcggagttgggaaagaactgcttcttcaccacgcccatgcccagtacgcacagtacaaacgcggccaccaccagcccggtcaccagccaacgcccgcgcacgcaggcttccaccagcgtgcgcagtttctggtagtagcgcccggcgtagatcgcgtcatgcccgccgggcaccggcttgatctgtggcaacagtttcacgcccaggtatggcgtgaacaccaccgctaccagccaggaggaaatcagtgcaaagccgacgatccagaagatattgccggcatattccccggcaccggagcgcgcaaagcccaccggcagaaagccgatgatcgtcaccagcgtaccggtgagcatcggcgccgccgtggagctccaggcaaaggtggcggcgtggatgcggtcgaaaccttcctccagtttcaccaccatcatctcgatggcgatgatcgcgtcatccaccaacaaccccagggaaataatcagcgcgcccagggtaatgcggtcgaattcacgcccggttagcagcatgatcacaaacaccaccgacaaggtcagcggcaccgcagcggccaccaccaggccgacacgaaagcccaaggccaacaggctgatgaccatcaccacggcgagggcaacgaagaacttgagcatgaactcgttgaccgccaggctgatgtttttcgcctggtcggagactttggcgaagttgaccccgagcggcaggtcggcctggattctggcttcctgggccttgaggctcttgtccagctccaggccgttccagtgtttctccatgatcacgccgagcatcagcgccgggtcgccctggtggcggatgcggtagctgggcgggtcttcatagccgcggctgacggtggccacatcggcgatgcgcagcacgcggccgttgacttccagcggcacgttttcgatcagtgacaggctgtcgaacgcgccgtcgatacggatgtaggcgcgggcgccggcggtctcgacgaagcccgacggcgccacggcgttttgcgcggccaacgccgaaaaaatctgctccggcttgatgcccagcgtcgccaggcgttcataagaaaactccacgaacacccgttgcgcctgttcgccgaggatattgaccttcttcacccccggcaggttgaggaaaccctggcgcaattcttcggccatctgcacctgttgccgatggggcaggtgctcggcctccagcgcgtacagcgcgaagtacacatcggaatattcatcgttgaagaacggcccgctcacgcccttgggcagtttggcggcttcatcgctgagttttttacgggtctggtagaacaggtcctggatttcactgggccgcgtggattccttgtaggtcatgcgcatcgacacgaaacccggctgggcgatggtctcgacgcggtcgtagtagtccagttcctgcaggcgcttttccaggcggtcggccacttgctcctgcatttcctgggcggtggcgccgggccaggcggcagtaatggtcatcaccttgacggtgaaagacgggtcttcggcgcgcccgagcttgccaaacgaaaacaccccggcggcgaggatcgcaatgatcaggaacaacgtgaccgcacggtgcttgaccgccagttcagagaggttgataccgcgcatgctcagttgtcctgtttgcggttgagggccaatgcctgggcgggcagcaggcgtacggcgtcaccctcgtgcagcaggtgtgcacccagggcgacgacgatttggccgggcgctacgccgctgtcgagcagcgcgtcttcctggccgaggctggcgactttcaccggggcgaagctgatcgtgtcatctgcaccgatcacccacacgccagtgccttgcccggcgtcctgcaaggcgccgatgggcacgcgggtttgcgcggcctggccgttgccttgcaggcgcacggtgatggtcgagccgagggcgaaacgctcgatggtgccatgcaacacgtagcgagcgcggtaggtacgggtagtcgggtcggcgctggcggacagttcgcgcagagtggcggtcaccgcctggtcgggggcgccgaaggggaaggccagggctttctgcgaagcttggtcgcgctggttttccggcaggttgacgatggcttcacgggctccgtcgtgggccaggcgcgcaacgatctgtccttcggcgaccacctggccgcggtccacccgcacgtcggtgatgatgccgtcgccatcggccttgagcaccgagtaagtgcggcggttttcgatctggctggcgtcggattgcgccgcggccagctcggcttcggccacccgcaggttggtcgccgactggtcgaagatctgccgcgacacggcgccggtgctggccaggcgctggtagcggttttcgtcgtcacggcgttggcgcagttgggcctgggcggcggtgacgcggtttttcgccgagcgcagggccagttcgaagtcgccgatgtccagtaccagcagggtgtcgcctcgggacacgtgctggccggggtcgaccttgcgttcgatgaccttgccgccgacgcggaagcccaggtcgctttcggtacgtgccgcgaccacgccggtataggcgctttgctgggtgccggccgcttcgactttggcggccaggaccgggcgaggttgaggcacttcggcggcggtgtcggccttgctgttgcagccattgaggacgatcaacagggccaggggcgtgagaagacgcagggggagaggttgcatggcgggctccggggtaaccattgggcaaaaaattatggacataattttttacgcatattatggtcgaaatataaattaatccagccccccggatgttccccatgacaaacgccccggccccatcgcgaagcttgctgtttttactggtggccctgacggcactgggtgaggtctcgacccaattgatcattcccggcctgggtgccatcgagcaggcgctggtcgcgccggcaggttcggcactgatggcgttgtcggcatttgtcgccgctttcggccttgggcaactgttgttcggcccgctgtcggaccgtattggtcggcgcccggtgctgattggcggcctggcgctttacgtgctggcgacgttgtcgatgctgctggtccacgacatccaccagttcattgccgcccgcgtgctgcaaggcctgggcgcctgcgccgcgctggtactggcgcgcacggtggtgcgggatgtgtggaaggccgaagccgggccggccctggcgttgaccatgatcggcatgctctacgccatcgtggtggcgccgatggtcggtggcctgctgatcaaactgttcggctggcacgcaccaatcctgctggcgctggcgattggcagcgtggtgctgttgctggcgttgctgttttttcgcgagagcaaccactcgctcgatcccaaggccggtcactggcgcaccctcggcgggcaatacctggacctgctcaagggccgccagtaccgggcgttcgccgtggcgctggcgtgcacctatggcgccatgtttgcggtgatcgccggttcgtcggcggtgttcatcaacctgctgggcttcagcagcctggaatacggcctcaattttggcctgattgtgtcgatgctgatcgtggggtccacctatacccgccgcaacatcatgcgcctggggccgcagcggattgtagcgatgggcgtgacgatggtggcggttggcggggtgtcggccgtggtgatttatgaactgttcggcctgtcggtgctcggcctggatattccgattgccctggtcaccctgggtggtggcctggtgttgccgggcgcggtcaccggcggggtaatgcccaatgcgcatcgcgcgggcctggcagcggggctgatggggtttgcgcagatgttcggtgcgacttgcagcggcatcctgctcagccagctgcgtgacggcagtgccgcgccgatgatcatcatccaggctggctttgcgctgacggcctacgtggcgtttcacctgctgcgccaacgtcaggtcaagggattgtcctatacgtaggacgaacagggctgcttttgccggctagtgctcaacggcgggcagccttatggtgtatgcactttggaggtacaccatgaaaaagcttatcggcatctacaccagcccccgcgcccattgggtcggcgacggctttccggtgcgcacgctgttttcctacgacgccatgggcaagcacatcagcccattcctgttgctggaccacgccggtccggccgatttcaccccgactgagcaacgtcgcggcgtcggccagcatcctcatcgcggctttgaaaccgtgaccatcgtctacgacggcgaagtcgaacaccgcgactccaccggtgccggtggcaccatcggccccggcgacgtgcaatggatgaccgccgccaaaggcatcctccacgaagagttccactccgcagccttcgcccgccgaggcggtgcgctggagatggtgcagctgtgggtcaacctgccggccaaggacaaaatggccgaagccggctaccagacccttgtcgatggcgacatcccggtattgcccctggccaacgacgccgggcggctgcgcctgattgccggtgagtttgccggcacccgaggcccggcccgcacctttacgccgattgatgtgtgggacctgcgcctcaaccctggcaagcccgtcaccctggacctgcacgaggggcgcaacaccgcgctggtgatcctgcgcggcacagtgctggtcaatggcgaggaagtcgcgcgccaggggcaattggcgttgttcgagcgggagggcagccagctcacgctcgagtccaatgacgacgccaaggtgctgctgctcagcggtgagccgattgacgagccgatcgtcgggcatgggccgtttgtgatgaacaccgagcaggagattcatcaggcattcgccgactttcagtcgggtcgtttcgggcagatgtaagcacacccgctataccctggcgcggcatttcatgcgatcttcacggcattcgccctggagtcgcctggatgccctcatttatcgctgatcacccgatgctgtgcgccctggcgctgatcttgatcgacatcgccgtgtggcgtcttatttcagccaacctcgccaactggaagctggcggcgcggttggtgatctttgcggtgttcagcgccgtgctgttcaacgacggcatgaaccccatgcaactggcgccctatgcggacaacaccgccttgcacctggccgccacggcattgcagatcggttggtggctgttcgcggcgcgcacgctgacggtgttgctcggcacgctcatgatgcagcgggtcgggcataccggccgcctgttgcaggacctgatgggggcggtgatcttcctgatcgcgatcattgccgccatggcctacgtgctcgacctgccggtcaagggcgtgctcgccacctctggcgctgtagcaatcattgtcggcctggcgctgcaaagtaccttgagcgatgtgttctccgggatcgtcctcaacaccaccaagccttatcaaatcgatgactggatctccatcgacggcaccgaaggccgggtgacggacatcgactggcgcgccacgcgcctgcaaacctcccagggcagcctggcggtgattcccaactccctggcggccaaggccaagatcatcaacttttcgcgtccggcggacatgttcggcctagcggtcagcctgcaggtcagcccgcatgcgcggccgcaaacggtgatcgaagcgctggagcgggcgatgcaagggtgtcgaccgctgctgggcaagccggcgccaagtgtggcgttcaagacgtcggccagcggtggcgtcgagtatgaaatcagcggattcgtgccggccatggccctcaagcgcgaagtgcgcaaccagctttacgacctggccttccggcatttgcaggcggcgggcgtcggcttgctgtcggccactgaaaacagcgcgccaccggcgatgtccgcggcgcgcgcgttactggagcggtcgtcgattttttccaccctgcgccaggaagagaaagacaccttcagccagaacatgaccctgcacacctatcgcgccggcgagatgatcctgccggccggagaggtcagcgatcatttgttcatcgttgagtcgggtgtggtctcggtgatgttgaccaagggcgggcacaaattcgaagccgggcgcatggggccgggggaggtgatcggcgaggccgggatcctgtcggatgaggccacgctggcggatttctcggccaagacgttctgcaccctgtaccgcatcgagaaggaatacttgaagccgtgcctggatgcgcgccacgacatcggcgaagcgatgaaggccttgctggatttccgtgtgcacgccgcgcaggccttgacccaggaggcaccggtggtgccggtgaagaagggtttcctgcagtggctgcgccagcgcggtctgtgaactccagatcgtgcaggcacaatccgccaggcgtgttaccagccgcgcaggcgctcccacacctgtagttcgccggtctcagacaccgcggtgtaacagccgaactgcgcccctgtcgcacacgcatggttgggcagaatgcgtagacgtttgcccagtgggaattgcgcgaccacatccacgtcgcgcccctggaactgcgccacgccatgttcctgattggcgctgcccagcagcaatccatcgatgggcttgccgtgttcatcgcagacctggccataaccaaaatcacgcttctgcgcctgagtaccgcgatcccggctcatggccatccagcccgcgtcggtgatgatccagcccttttccggctgatggccgatcaccgtcgtcagcacgctcaaggccagttcatcggtgcggcatacgccgatgttgtgcatcaccagatcgaaaaacgcatacacgccagcgcgcaactcggtgacgccctccaggctcactgccgacagcgcggtgggggtggagccgacactcacctgtgcgcacggcatcccggcagcgcgaatatgctcggccgcttccacgcaccgtgcgcgttccagttcggcgatggcccgcagggcttcgggcgtgtccagcccgtagctttcgccggcatgggtcagcacgccgaccaggctgtcgccgagcagccgggcaatctccagcaagcgcgggtcctgcggcttgacaccggagcggtggccgtcgcaatcgatctcgatcatcaccgcaaaggtttcgccatgctcgcggccgaagtcgatgatggcctgggcaccggcaaggctgtcggtgatcagcgtcaacgcgcaaccccggcgacgcaaggccagggcctgaggcaatttgtgcggggccatggccacggcgtagaggatgtcgtggatgcccaggtcgaagaaatactcggcttccttcagcgttgaaacggtgatgccgcgggcgcctgctgcgatttgcgcggcgaccacttcagcgcacttatgggttttgacatgggggcgcaggtgcacgccgagggcattggcacgctgctgcatgcgctggatattgcgctgcattttcagcgtgtcgatcaatgcggcgggggtatccatggtgcgggctccacaatgaggggcagggggtaaattgacgccctgtccaggactggatatgttgtcttgcatgaaaaacacctctcccaacgatactcacttgatcagccagctcgaacagatcgccgagggcttgagcaagaccttcagccccttctgcgaagtggtgctgcacgacttgcgcgacccccggcactcgatcctggccatccacaacaacctgtccgggcgtgcgcccggcgacccgaccaccgagctgggcctggcgcggattgccgaccccgactacccgcaagtcatcgccaactaccagaaccagttcagcgacggccgccaggtcaagagcacctccatcggcatcaagggcgccggcggcgagtacgtcgcggccttgtgcatgaacgtcgacctctcgttgttccgtggcttgcaaggcatgctcgaacaattcggctcggtcagtggcgacaagctcatcgagtccctggacccttccggcgccgacgtgatccgtgcgcgtatcgaccagttcgccgcccgcctggccaccaccccgcgtgcgctgaagacagccgaccggcgtgtgctgatgcaggaactcaaggactcgggctgcctggacatccgccgggccatggaaacggtggcgtcccatctgggcgtgtcgcgtgcggcggtctacacctacgccaagtagcgcgccacggcctcgatctcgatcaggtaaccgtggtgcaactccggcaccggcaccaccgcgcgggcagggcggtgctcgcccagcgcggcggcatagaggccatcgaaggccggccaatgctcgacgccggctacgtacacggtgaccttcaccaggtcctgcgcggttccgccggcggcgttgaggatggccaataaattatccagggcaatttgcgcctgttcggcaaacggcgccatcaggttatgccgcccatccgggctcaccggcaattggccggagatgtacagcgtgtcaccgtggcggatggcttgtgagtaatggccggcaggctgggccgcatgggcggtctggatgatcttcatgaggcctcgcacaacagggcggcgtacttctcgatatcgacgttgccaccggtgacgataatgcccacgcgctggcccttgaagcgttcaccctgtttgagcaacgcggccaaccccaggcagccggtgggctcgaccaccattttcatgcgttgcataaagaacttcatggcgccgaccaactcggcatccgacacggtgaggatgtcgttgacctggtcgcggatgatcgggaaggtgcagttgcccaggtgctgggtctgggcaccgtcggcaatggtcgccggcgtgtcgatgtgcacgatgctgccgctgcggaacgagcgctggccgtcattgccggcttcgggttccacaccatacaactggcaatccggcgccagggcacgggtcgacaacgccgtgcccgagagcatgccgccgccacccaggccaacgaacaatccatccagcgggccggtgaattccagcagttcgttggcggcggtgccttgcccggcaaggatatgcgggtggtcgtagggcgggatcagcgtcaggccctgctcggtggccaggtcgcggccaatctgttcgcggtcctcggtgaagcggtcatacagcaccacactggcgccgtagccacgggtcgccgcgaccttggccgccggcgcatcgctgggcatcacgatggttgccggcatacccaataactgcgccgccagggcaatgccctgggcgtggttgccagacgagaacgccaccaccccggccttgcgctgctgtgcatcgaactgcgacagcgcattgaacgcaccccggaacttgaaggaaccggtgcgttgcaggttctcgcacttgatgaacacctgggcgccggtcagtgcgtcgagggtgcgtgaggtgagcactggggtgtgatgggcgacaccctccaggcgctgggcggcggaaatgacgtcgaggtaagtcggcaatggcatagggcggacctcattggctggtatggataaaatatctatatcaagacaaatagtaaaggttggtttgtgcatgttagcgttttgcacttctctgaccgctggaggattcaacattgatccgcctcaccgactacatcgccgacctctcccaatctccgcttgcaccgtgggctgacctcgcgccctgggcgctggccgctcaggcgcctgctgttgtgcgtcagttgctggctgaactgccgggcgacgattacataattgaggatgaaatcgcggtccaccgcactgccaccgtagaagcgggcgccttgctcaagccgcccctgatcatcggcgcccattgcttcatcgccagcggctcactgctgcgcggaggctgctggctggatgcacattgcatcatcggcccgggcgccgagttgaagacctccttcatgttcagcggcagcaagctggcgcacttcaatttcgtcggtgattcggtgctggggcacggcatcaacctggaggcggggagcatcgtcgccaactaccgtaacgagcgtgatgacaaggaggtgcgagtgcgggtcgacggtaccttgcagcgcaccggttgcgacaagtttggcgcgctgctaggcgaccagtgccgtatcggcgccaatgcggtgttggcgccgggggcggtgctcaagcctgccagcgtggtgggacgcgggcaggtgtttgatgctgaagcctccctataaacaccgcgttgaaaagatcatggtcagtcggcacgatattaaatagaatgaatctcatttgagactcactcgcgccgcgcaggtcgcttgccatgaatgatgctgttgttccgacccacgcctccgaactgaccttgtcgagcctgtaccgcgaccatcggagctggctggaaagctggctgcgccggcgcctgggcaacgcctgggatgctgccgacctgagccaggatacgttcctgcgcgtactcgccagcgcccagccgattgcgcagatgcaggagccgcgtgcttatctggtgaccgtcggcaaacgcctgctggtgaatttccatcagcggcgcagtcttgagcaggcctacttgaatgccctggcgagcctgccgcaagcctgcgtgccatcgcccgagcagcgctggctggtcctggagaccctgcaagccctggacgagttgctcgatggcttgccggtgctggtccgccgcgcctttctgtggagccagttggaaggcctgggctatcgcgacatcgccgaacggcttgaggtgtctgaacgcacggttaaacgctacatggcccaggcctacgaacactgtttgctggtggacctgtgagccgtgacgtcgctcgcgccgctgcccagtggttggcgctgctcgaatccggcgcggccaccgagcgtgaccacgccgcgttgcagcactggcgagacagccacccccagcacgagcagacctggcaaaaagcccagaccctgcgccagcgtttcagcgacttgccccaggccctggcgatggccagtctcgaccgtccgcaaccggggcggcgcgctgtgctcaagcgtgcattgggtatcgcagccttggtgccgacggcctggctggtcagccgccaattgcccctcgaggcgtggcgcgccgacctgcacaccgccaccggcgagcgcaagcgcatgtccttggccgatggcggcagcttgcagctcaacacggcgacagcggtggacatggaccttgcacagcggcgcatcacactcgtagacggtgagttggcgctgaatgtacccggggcggcggcgatgacggtgcagacccgctatggcgaattgcgggtcagccaggccgaggtgtgtgtccggcagctggccaagggttgtctggtgtcggtgctcaagggcgcggtccaggtacgcgacctgaacgggcaaatggcgacgttgccgggtggtcagcaagcctcgctgcaagccggcgggctcggcgcctgggcaccgttcgatgtgttgcaattgggttggcgcgaccgcgtgctgaccgcacagaaccaggcgctgggcgacttcttgcgggaattggaacgttatcgtcccggtgtgttgcgctgggatccgagcctggaaacgttgcgagtgaccggcagttttcgcctggacgacaccgacctcatcctcaacctgctggcccagaccctggggctggaactgcacgcacgcacacgctattgggtcaccctgacaccgcgcaaatcgctcacctgatgcgggtgtggtaattcttatatatccatatagaataaataaagagttatatattccttttgttgttgttgtcgatggcgcattttgagggcctgcgcattcgtgcggattgacccaacagccaaaaggaaagccgacatgaccattaaagcgatcaacgtgcgcaaccagttcaagggcgtgatcaaggaaattctgctgggggaagtggtgtcggaaatcgacgtgcagaccgcgtccggcattgtgacttcggtgatcaccacccgctcggtgcgtgacctcgaattgaaagtgggcagtgaagtgattgcctttgtgaagtccaccgaagtgtccatcgccaagctgtaaatgaccgcccccgcactcaggcgggggctgtcatgactcaagcgatcttcggtccactgccacccggtggatgcggctgcggtctctccggcggcgcatccgtcggcaggctcttgggtttcgcgttcgggtctttgtagcccttgtgcaagccgccgtccaggcgattgctcgacgagccacctttctgcggggtctggtcgaagtgttcccactccgattgctggaagcggaagatgctgtcgtcggtcggcgcgtcacggccaccgtaatggtggatttcatagtgggcgtattcgaccttgtcggcccagttgtcctgcaacagaccgtcgcccgccaagtcgcgataccagtcgttttccttctcggtggccttctgctttttgttgtggtcgacaaagtagccgatgatcccgccgaccaccgccagcaccacacccaccaggaacaacggcccggtcaacgccgccgccgtgcccgcgccaaacagcgccgcagcccccagtaccccggccgatgcaccgaacgcaccgccggccacttgcaggccgccggccgcctgggccaaggggtctttgtccttcacgccgctcttgatcgccagtgcgcccagtacgatgtcggcaaaaccgccggcaatgtccgtggccgggcccagcaccttgatcacggaaccggcgatctttgccgatttggacgcgccgagcttggccgcgcccgcagcggccaggccgtcatctaggtgggtggccaggccttcggtggcttcggtgacggccttgtcgccctcgccgaacagcttggagatgccgtcgtactggctgtccggcaccgcatcgagggccgtggcgatcttggctttgacatccgagggcagttcgctgacgcggaattcgaagttcggctcctgcatgccggtcttgccccagatctccggcagggtcttgtccagcccgaggaaatccaccaggccgcctttgcccaggctctcgccgatcttgtcgcccaggcgtacaaagtggctggagccgccggcaaaactcaggaagtccttggcgatggtcatgcgttgcgctggggtttcgccgagcttgccgcctttgcccaccagttggtaaatcccggaaaacaggctcacaccggcgcccagtgaaccgaggatgcctttgctgttgagggtgttgaacacctcgccgagcatgccgcgatcggccaccgggatgtagggtttgctcagggcggttttcaggtcagcttcgctgatcacgccgtttttctgatacacggcgcccagctcttccagggccttggtgacggcggcagatttttccttgccttgcaggccttcgttgaggaatttctccagggtttcctgggtgcggcgcggcaagtccagcacgttgcccttgagcacgcctttgagcaggccgaacaggtccttggtggccagctccttgttctcgtcggagatcttgctcgggtccgacagaatggcattcaggtcggtggtcaagccgtccgcctggatgttctgcgcggctttgctggcggccgccgggtcgaacagcgacagcgacgtcagggtatcgctgaggtctttctgcgcctcgtaggtcttgccctggctttgcaggtccttgaggtacaacacgtagtccgggttggaggtgaggtccagcagcttctgcttgatctcgtccttgttcggcagcttgttgatggcgtcgtccatcttcgacttgtagtcagcctggatggtagggtcgttgaacagttcaccgatctgtttttgcacggccttgccgtcgacgatgtcgtgcatatcggccgaggtcagctgggtctgcttgtcatcgaactcgcgccaggtggtgttgaacgggcgtttggactcctcgtagccggtgatgccgtggccgttctggtaggcggcttgcgcttcgagggcgcggaccagcttggcgcggggatcgtccttggcaatcgagccgttcttcacgccttcgcggtaggtgtcgatcagttgcgtggtggccagttcgctgacgctgagggtcggcgacttgtcgtccttttcatcggcgtgcacgccagtgtccatgttcagcacgtccagctcaccggacttgggcaggttgtgcttggtgcgggtatcgtccaccgaactggcactggaggcttcccacttggccgccacatcatcgtagagctgcgggctgagttccttggagacgatcaccttgccttcgctggtttcgtagcggatcaggccgtcgcccagttcatccggggagccgaaggtgatgtcggtgtttttcaggaagtcattcggcccggccagcttgtagccttcgccttcgctggtgtggatcttggcccaggtgtcattggcggtggcgacgctcttgaacagctcggggctgacgtcggaggacaccaccaccttggtgccgtcatgcagctcgtaggtgaggatgtggtctttctggtcgttgttccaattgaagttcttgtagtcgttcaggcccggcaccggggtgttggcatcggccagtatcgcgccgttattcagctcgccttccaccacggctttcttgccggggtcggtgtagaccgcgtgcaggccggccaggtagtcgaacagcttggggttgtcgtcgcgggccaccaccattttctggccgttgctttcaaagcggatcaggcccgggccgacttcatcctcagggcccaccgtggtgccggcgtagggtggccacacttcgttgtcgctggcgcgcttgtaaccggcgttttcactgttggacaggccggtgaagctggcataggcgtccttggctttctggaaggcttcggggttgtcgcgctggctgatgacgaccttggtgccgtcctgggtctcgtagcggatcacacccgggccggtttcatccggtgcgccaagggatttgtaatcggcgagtttgcccggcgcagtgccatcggtaccgaggctctggtagccggcattctggctggcgaccacgccggagagggacttgaagtcctggctgacctgcttgaacagctcggggctgtcctgttcgctgacgatgactttcttgccgtcctgggtttcataacggatcagcccagggccgacttcatcgggcgggccgatggccttgtagtcggccaatgccttgggcggcgtggcatccttggcggcgagttcgtagccgtcttttttacttgcatccagccccgatggtggcttgtcctgggcctcaacctttttgttgttggcgctttgcttgagcaacgcatggaactgcgcgccggacttgggcggcatgcggggaagggctttggggtcggacgagcgatcgaggggctgggtcgtcatgccatgaaactcctgctgttaccggtggggcgtatcggcaaaaacagtaacagcaggggttcggcacgcgttgcgaaaagttgtgaattgagtctgcggcagctttcaattcaaagtacgccataagttcgggagcggataagtctgataggcgcccaggatgcaggattggtacgttggcctgagccaggatactcaacgacagggacgccatgccataaatcactttccagagactacccgtgcattcagcgtcctccaccgccttgtcgatgtttcaatctccgaatctgcagaacacagacgctccctctgcggtacaacaaagaacacccgagcaaaatcgcactcgccgggatacctcaagcgcatcccggcaggatcgtgacgccccctccaacggtattccggataccgacgttccagagttatttcaacagaaagtggccacggctcggcatgagttcacccgcgacgactacttgcgcggctataacgcgccctcgtcagtagcattgcctggttatcactcatcaatgcgcgacgtggcgctcatgaggcttgcggtggataaccggttaagcccggaacaaataggtgcattacagcgcctggttgagcagcgtgtgatcaaccgttctcaacaatcggtgagccagttcacaaagataatctctacccatggcgtaaaggtgactcccgcaccgcaaagctactatctgtctatggtgaaccaggcatccggcggcgaatgcgcagggttttcacatttactctccatagcggcggcgcagggtaaacaccagacttttctgagtaatgtctattacgccatcgcaaatccgtatgcgccggaatcagaggagtttttccggaaagtcttcgaggttcaggcccgtgtaaaagatcgtgatattgcacatgaccctgcaaccgtgaaggccgccagctataccgagattgccccgcagttgttgaactcgccgtccacaaaaacgctcttgatcagcagtgaagggcatcgcctgaccgcaggcgtcatcgttgatccacaaggggggcgaacgtattacttcagtgatcccaatacgggttttactgaggctgtttcggcggaactgtttgaaggtgtactgaagaagatatataccgatcccgtcctgaaacagtttgtgcaaccgttgaaggcgtttccgggtgaacagaaataccttatcagcgtattcaatccagatcttattcccgagatatccggcgcatccaacgacatcaagttcatgtacaaccgtcctctgaatgggctggacactgtcacagtgctcaatacttcacggctgccgacggttgaggattcccgcctcaaggcgtattcccccgaacacaccgccatcaaagattatgagcgggtggtgcaagggctggacaacatgcaggccagcagaggcatgccgcagtatcaccaggcaaagaccgttctggaggccgtcaatctattcatcagcagccaccctgcttccgcgctcgtaccggctatggagacactcaggaaacgtttgacaagtgcgatcaatgaggcaattgcgcctgttgagtatccctatgtcttcgagcgtatggagcaagatcgtgtggcgttggccgagggtaaagtcggcttgtcgaaacatttccaaagtgaagtcattcagggcaagactgttgatataaagagtaatggtgatggtgaccccgatagggcagtacgggtaagagatgctgtagacgacgctctgaagaagctcgcgcagagcgatcctgcagcggcgcaggcgatcgggggaaaagtcagggtgattattgccaaccctggcgatcaaccagaaacgcggctgcactttaatagtccgccgacgttgatcattggtgatgatttttttgcgtcaccccctgcaactgacgctacagtcgccgatcgaatcggccatcaagctcaggcggacggaagaaaggtccaagcgtccaggcaggctgcgctgattgtgggcaagctggggatgttgggctattacaaagctgactcccaagggttccttgaggtggttaacaacaaggagccctttcgcgacggaggcagtaaagtcagcgcacgcgctgccagaagcccaggtgatttcatggaggagaccttcaccgcacgtgtatacgatggaaaggtcggtagtgaaaccgatgctgcgctcaataggcttttcgctccagcagctaacgctccaccacccagcaccccgcagccaccgagcacgccgactctgccggtcaacacgggagcattaccgaccacagcgggagggacgattgacgaggctgaagtaaaacgcctgcaagcacttgatgaaacccgcgcgcccttgcaaataggggaagcgagcgtcagccgagtcgaactttataaaatgggcgtgcacgtcaagggtaagccagttgaaaacacagtgcccatggatgccaaggggcgtatcagtggcgacgtggaaatagacttcgaccgtcttgtggcttttttgaagtcgacatcgcctgaagttggggcgcgcgtgacatccatcgccagtgaaattgctgtcaagcgcagccctgtcacggcccccttggtgacccgcagcgacggcagtcccgtccctgaacacttccagaagcaactacgtgacacatcacgacaggctgctgagatacgtgacgtgcagagcagcggcaaaccgctgcccgcaaattttttctccccggcagaaacatcgggaaagccgggggcgactaaagccgccggcctcggcttccaggcgttcagcacattccaggggctgtgcagttccatagagagttttcaacgtggcgatacgacggcgggggccatcgcagcgggcgctgtagcgtctgactacgtcgggatgggtgtagaggctggcctcaacaaaatggcgcagtcggcagtcaaaaccgtgacgccgacgataatgggcttcaagtcctcgacgataggcaagatgattggaaaggttgcgggtggggccagcgccgctatcagtgttccttttgatatcaaaaatgccgtcgattcgttcaataaagcggctggcagtaccggtaaggaagcgcaggatcactatgtcaacggtgcattcgccgtcaccaatgcggtgacttcgataggtttgagcgccgcatttctggccggcgcgagtactgccgggccggtgggacttgcagtggcggcaatattgatgaccgcacaagcgatttactcggccgtgcgtactgtggaggacatcaatgaatacacgccgctgtccggttcgaaaaagttcgaagtcggactgaaaacattcctggggtttgagcctgggtttgatgtcatgaagccttatctggaagcgaaatatgccaaggattacgacacgcagaagaggacgtatcatcaggccttcctggacggcccgggcaaagaccatttcgaacgtgttgtatttggcgctggggatgtagtcgtcacgcaggtgccgggaaaggttgaactgacaggccagcactggtgggctccgatcacctatttgctgaacctgatcaaagtggatgggaaagtcccatccgttaacatcaggggtgggaatgatcgtatcaatgcgcctgccgactcctggaacggcatgtcagtcaagcctgtggagggtgcacaggggacaggaaaggccacgctctgggacctgggcgatggcgatgacgaggtggcgggagtattcagcaaacccaactacttcttgttggggggagggaaaaaactgatcagtgggggagcggctgatgattcggttatcttcagcgctgatgcacgtcagaccctgcagcaggcagagcaggtctgggatactcagaacaataaagggttcagtaaaaaagccactgagctctggggcggtgagggccgtaacacactggtattttccggcagcttgagcaccacttacaccgaaggcaaagacactaaaaccgccagctattcagggcatgtcattgacttcaagaccgggttgatttcagtcagtacgccagactcgaaaacagaaggtacttctcccattgcctattttcatgagttttcaaatgccgccacagttgaaaatggcgaaagttatatcgtgggtgatgaccagagcaatctgtttaccttgaacggcaagcatgatgtggttttgaccggcaagggctccaatgttgtcgtgatcaatggcggcgctaacattgtcggagagggcggccccaatacctacatcgtcaacaaaagcgataaggaggtcaccatcaaggacccgaacgacagtgtgatcaagttggactacagcgcggcacaggtgtcgggatggagggtttcagcctcgggggacttgactgtaaaccttaagggggatgagcctggaagcgaacgtcaactggtagtccagaatgctttctccagcgattcaacgagtgacaaggcacggcccgcatttatcaccaatgacggtgtgatgatggcaatcaacgcgccacgccagcctggttcaggcacacgtgttgtgcaggtcagcagtgtcaaagtcgaaggtcccatgccccaagcctgagtccccgcgcagtagcaacagcatggggtgactggcaccggatacagtgccagtcaatctcagcgtttttgcaggctgcgctccatacgctgcaagccttcctccagcatcgaccgtgggcagccgaagttcaggcgcacgaattgctggctgtcatcaccgaattcgatgccggcgctcaaaccgaccttggcctgttccaggaagaactgctgcgggtcatccaggcccagggcactgcaatccagccaggccaggtaggtgccttgcggcgcgtgcatgaccacaccgggcaggcgggtctgcacggcgttgagcaggtagtcgcggttggcttgcaggtactgcaccaaggcgtcgagccagtcggcgcattcgctgtaggcggcgcgggtggcttccaggcccagggggctgacgctgtcgaccatgccacaacgggcgtggttgaagcgctcacgaatctcggcgttctgcaccacggcaaagcaggtcttcaggccggcgacgttataggccttgctcgccgacatcagggtgatggtgcgctgggcgatctcggggctgaggctggcggtggggatgtggcggcgaccgtcgaagcacagctcggcgtggatttcgtcggagatgatcaacgcgccgtgttccaggcaggcattggccacggccagcagttcttcacgggggaagactttgcccatggggttgtgcgggttgctcaacaacagcgcgccggcgccggtgagcgcctggcgcatcgctggcagtggcgtgaggtattcgccgttgaccagctcgaacggcacttcgatgcgcggcaggttccaatgccctggtgccaggcggatcggccggtagttgggggtttgcagcaccaccggttgccccggttggacaaacgcatgcagcgccatattgaaacccggctccacgcccggcaaaaacagcagctcatccggctgcacgcgccaggcgtacttggcccacaggtcggcgatgattgcctcgcgcacatccggaccggcgacgctgtagcccagcacctgctgatcgaggcgtgcgtgcagggccttgagcacggcgggcggcgcggcgatgtccatgtcggcgatccacatcggcagaacgtcttgcgggtagcggttccacttggtgctgccggtgccgaggcgggagtgaatcgtgtcgaaatcaaagctcatggggggctcgtatcagggcgtcaggcgcagggatggcgctgattctagcgccataatttttataggccagagctgattgcgagcgacagttgccgatgcgcctgttccaacgcgcgattgaccgcttcttcaccgcgcaccatggccggcaggtacacgaaatccactgactcaatgcccacggtcgccaggatggcggtcatgtacggcgtgaggaagtccggctcatgccccttgcgggcgttaccggaactgaccagcacaaaggtgcgccggtcttccagcaagccgaccttggcgaattgctcattcaccgtgaagctgcgctggatgcgtaccacatggtcgatccaggccttgagtgccgccggcacggtgaaattgtgcaccggggtgcacaggatcagcaggtcgcaggcttccagttcaacgatcaattgttccgagagtgccgtggcactgccgctcaggccgccgggtgtggtgagtgcgttggcatattcacgggtcaacggcggcagcgcctggccgccgtagtcacgttcggtcaccgcggcgtccggcaccaggtcgcgcagcagggcacgggccagtttgaaggtctgcgcggctttgccgtgggggctgaaaccaaggagcagggcacgggtcattggctgaggtcctgggaaaagtgcatgcctttgggcagcaggccctggcggaaatagaagcgctgggccagggccatgtgcatgccggtgtccagtaccagccagcgatagccacgggcgcgggtttcttcacgcacgcggtcgagcagttgttcaccgaggcggcgccgctgcaacgtggcgtctactaccaggtcatcgacatagataaagcggccatacagggtgttctcggtcagccggtagccggccaggccgatcacctggccgttctcccgtgcggcaagcaggcggtagccgttttgccgttggcgctggacttgctcggcgaatgccgtggcgtcgctgaggtgcgggcgcagctgctgcatcaccgcaaagctggcgatgagatcagtcgcggtttccacgtgggcgaattcgacgtgttcattcatggctgtggttctccaagtgggccttgatcgccgccggtactttgcgaaagctgatggcgacacggttaagggcgttcatcaagctgatggccagggtcaggtcggcgacttccttgtcgctgaacactgccgcgacctgtgcgtagtccgcatccggcacctgggtttgcgcgaccggcgtgaccacctcggcccaggccagcgcggcctgttcacgcggggtgtacagcggcagcccctcgcgccaggcggccagcaacatgattttttccaggctcacgcccagcttgagcaggtcgcgggagtggctgtccaggcaataggcgcagccgttgagttgcgagacccgcaggtaaaccaggtcgatcagttctttttccaggccgcagccgtggatatagctgtgcaccgagcccagggctttataaccggcgggggcggccagggcgtagtcgagacggtgtttcatgggcgatccttattgcggtgaagagatgcgccattttcgtggctggccgggtggcctgacaggggcatgattggacaagtgggttgggacatgatcagacttcggcctgtcttcccgccgagccacttgcgatgtcgtcactgcccaaataccaggaaatctaccggcgttttcgccaggccatcgaccagggccagttgcgccccggcgaacgcgtgccctcggtgcgggcgctggcccaggaactcaaggtggcgcggggcaccgtggaggcggcgtatcaactgttggtcagcgaagggttcttcgaagcgcgtgggcaagcggggacggtgattgccgaggcgttgccgcaggtgtcggtgaaacccatgccggttgcgctgccggcgacttcaggccttcggccgttgcaaatgggcctgcccgccctggatgcgttcccccgcaaattgtgggcacgcctggtcacccagcaagtgcgccgcaccgatgcggacagcctggcgatgggcgatgtgcgcggcacccaggcactgcgcgtggcgattgccaactacctggcgttgtatcgcggtgtggaatgcacgccgcagcaggtgtttgtgtgtgccgggtatgcgggcggcctcaccctggtctgcgaagcgctatcgatggcggggcagcgctgctggtttgaagaccccgggtacttgcatgcgcggcagttgttgaggcatcgcggtgtggaactggtgccggtgacggtggatcgcgatgggctggatgtggcgcagggcattgcacgggggcgtggggcgcgactggcgattgtcaccccggcgcaccagagccccttgggtgtggcgctgagcccggcgcggcggcaggccttgctggaatgggcgcgggagcagggcagttgggtggtggaggatgactatgacagtgaattccgctatcgcggccagccgttggcggcgctcaagagtcaggatgcggatgaccgggtgatctatgccgcaagcttcagcaagatgctgtttccggggttgcggttggggtatctggtggtgcccgtgtcactggtgtcgacctttgggcgtgcggccgaggcgttgcagcagcgtggggcgcagttgttgcaattgacggcggcggattttctggagcaggggcatttcacccggcatttgaagaagatgcgccagttgtatacgcagcgcagggggtatctggtggaggcgctgcgcgtgcattgcgcggggtatctgcgggtggatgagcaggcgggggggatcaatttgctggcgcggttggtggtggatgtgccggaccttgtcgtggctgaggctgccggtggggcggggttggcggttcaggcgttgtcttcctggacgcttgaggctgggcgggggcagggggtgttgatgggctttaccaatgtggcttcggcgtctgacgcggttgtggttgccatggttttgcgtgatgtgattggggggtgtgtatccgttatttagttcacggctactatttggttccgcccttacggccagctctttcaaggtctttaggtagaacaggcgataagtaccctgtggtgagcgggcttgtcccgcgttgggctgcgaagcagccctgaaactcgcgtctgaagagtgcctgactcaccgcattgcttcttccagggtcgcttcgcaacccaacgcggggcaaacccctctcgccacaggagcagtgttcgtctttgcgctggccggtcagtgcttgaccggggtcggcagggtcacgaggttgacgtagccatcccagaattgcttctggtccacgccgaacaccaccttggccttttgcgtgcccaccggggcacctttggcgtagcccagtgcgcggccgtagtcggcgccgaaggtggcgtccacatccacccacaggtcgcgggattcggtgacgattgcggggttgaccaggtacagcgccggcaggctgtcccaggtgaagctgtggtagctcgggtccttgtcgaacagcgggccgaactcatgcttgtacaggtcggcaatcgcgcctttgcgagcgatcacgcgctggtacaccgccttgtcgaaggtgactttctcgcacacatcgttggggaaaatcacgtgctcgatgggcgagcgcaacacgatctttgccgcctccgggtcgaaccaccagttgaactccgctgccggcgtggtgttgcccggaatctccagggcaccgcccatgtacacgatgcgcttgatcagcggcacgatgtccggtgccgagcgaatcgccagggcgacgttggtcagcgggccgacggcgaggatcgtcacctggtgcgggttggcgcgcacgctgtcgacgatgaactgcgcggcggtttccttgcgcagttgggtgtgggtggccaggccatccggtggtgcgaccaactgcgaaggagacgtcgggcgagggtgcttgaacgcccccggccagccggtaccgaacagcgtcttttccgcctcgtaggtggcgtagtcatgcagcaacgggtaggcggcgccggagtagacgcccacctctttctccacgcccatgcgttctacggccttgagggcgtcgacctgttcctggtcgacccaggcgttgccgctgaccagggtcatgcccagcagctcgatgcgtttctgcgcatgcagctgggcgagcatgatgaaggcctggccgtcatcgttgagcacattgaagtcggtgtcgaagatgactttttccgccgcctgggcggtgccggcacacaggccgaccgcgacaagcaacgcacagcgtttcaagaagccttgcatggtgattcatccgaaaaaatgtggttatcagcggttgaccagtttcgccggcaaggcgatgaccaggaagctgctgagaatcaggcaaccggcgaaaaaccacaaggcaccggcgctgctgcctgtgacgtcgatcgcaacgcccatcagcgagttgctcaccaggccggcaatattcgccaccgaacaggccagggcaaagccggtggccgccgcggtgcctttgaggaaggtcgccggcaggctgaaaaataccggcaccgcgccgatgatcgccgccgaggcaatcgcgaacagcgccacggtggccgccacgctgtgggtgaagaaggtgctggtggccatcgccgccgcgccgatgaaaaacggcacgatgatgtgccagcggcgctcgcggtgtttgtcggagctggcgccgatcaacagcatgccgagcagggcggcgacgctcggcaaggctgtgagcacgccgatatgaaaggtgtcggtgaccccggcgttgcggatgaaggtcggcatccagaaacccatggcgtaggcgctgagcaggatcgagaagtcgataccgccgagcatccacaccttgaggttgaagaacccgtcgcggaagctgtgcttgctggcggcgccatcggcgtcgtccttgcgcagctcggtttccagcagggtcttttcctcgtccgacagccatttggcttgctggtaggtgttgggcagcgcccagaaagtcagcacgccaagtaacacgctgggcaccgcttcgatcaggaacagccactgccagccgcgcaggccgcccatatggtcgaagtggcccatgatccagccggacagcgggccgccgatcacgctggacagcggcaggccgatcatgaacaacgcaatgatgcgcccgcgccggtgggtggggaaccaggtggtcaggtagtacagcacgcccggcagaaagcccgcttcggccgcgccgagcagaaagcgcaggatgtagaactgggtggtggaggtgaccagcatggtgcaggccgagagcaggccccaggtgatcatgatgcgcgcgatccagatcttcgcgccgacccgttcctgcaccaggttgctcggtacttcaaagaggatgtagccgacaaagaacaggccggcaccgaggccgaacgcggtttcgctgaactgcaactggtcgagcatttgcagcttggcgaaaccgatattgatccggtccaggtaggcggccagataacagaagcacaggaacggtatcagcttccaggtgatcttgtggtaaagcgtgttgacgggatcggcgaccgtggtcgccggcgctgcattcgcaatgggcatcgggtgtctcctggcggtgacttatggtttttttatacagccggcagttggtgtagggtcgcggaccgcgctcttatggcgcttttatggctaaaaccttattgctccctgaatttgcgcatcgcctcctgcttgctcaccacgtcgccatacttgctgtcgatatcgaacaggttggcttcatggggggccgggtgtcggtcgccgacgcattcgcgcacgacgatggtgcgaaacccgtgttgcacggcatccaccgccgtggcgcggatgcagccgctggtggaacagccagccagtaccacggtgtcgatgccttgtgcatgcagcatcggcgccaggctgctgccaaaaaacgcactggcgtactgcttggtgatcaccacttcatcggcctggggcagcacctcggcgcagaacgcggccagtgggttgccttcgaccatgtctttcatcaccggggccttcttgacccagattccgccatcgacgaaatggccgggatggtagcggatattggtgtgcaccaccgcaatcccgtgctggcgcgcgctggccagcagctccacgctttcagccacggccgtgaccacacccggtgcgaacagcggcgcgccgtcggtggtgtagccctgcatgaagtcgatcatcagcagcgcggcctttttgccaaagccgatgcggttgccccatacgccctggtagttggcgtcggcggattgttcgctcatcttctcaactcctcattcatgtttgctgtggcgagcgggcttgttgtggtgagcgggcttgccccgcgttggagtgcgtagcgctcccgctttttttggggccgctgcgcagcccaacgcggggcaagcccgctcaccacagaagcccgctcgccaccaccacagaagtgctttgcactccaattagtaggcaccggagagcagggcacccgcgccaggcacgatgggctccaggtccagggccttgagcatggcgtaggtggtagcgatagcggcggtgagcactggcttgccggtttgtgcctcgaccttggccaccaccggcagcgactgcatctgcacgcaggcggacagcacgatcacgtcgacgccttccaggttcatgccggcgacgatggccggcaggttggccgggtcgtggcgcgccacttcgaggttgtcggggatctccagggcgcgccagtccaccacgtcaaaaccttcttcgcggatgtagttcaccaccagttcggtcagcggcttcatgtacggcgcgacgatggcgatgcgcttggcgcccatgactttcaggccttcgatcaaggcgccggcgctggtgatgaccggggcgttggcatcgttgtcggcggtggccttgcgcaggcgttgttcggagttgcggtgatatccgagccccatggccatgatcgccaccaggcacgcataacccagcacgtctaccttggcgtcggacagttcgacggcgcaacggtcggactcaccgtccatggccgccagttcttccttgcgcacctgcttcatgcgcatgcggctggagtgaaaggtaaaacgctcgggacggatcgcctggcgcgcggtgagcatcgccgggatctcggtttccatggtggtgttggagctcggcacgatctggccgatgcggtaaggcttctgcatggtggtctccgtttttattgtgtgaggaagtcgccgagggcgtggaagaaaccgtcgaagtcatcccacggaatcatgtgcccggcgttgggtacgcaggcgacctggatgtgcggctgcaggtcctggatttcggcaacgtcctcatcgaggatcaccccgccgcgaccggccaccatcaacagggccggggccttgaggtgaggcagatcctggtggaagtccacgctgtggaaatcattgaaggcgcgcacgatggcgggctcatagcaggtgtgcagccattcggcacgcagttgcagttgttcgtcggtccaggtggcgcagaaggcacgcatcgcctcggcgtccatgccgaccagagattggcggatcgaatcgacgtaccacggcagtttgctcgggtactcacgccgacccgggccagacaccggcgggtcgatcagcaccacgcgcttcacgccctgcggatgtttgaccgcactgcgtacggcaaaacgggcgcccatggaatggcccatcaggtggtagctgtccaggttcagcgcatcggcaaaggcaccgatgtcgtcggcgcaggtatccgcgctgtagtccagttcggggccggtggaggacagcccgcgaccgcgcacgtccagcacataggtgtcgaactgctcgcccaggcgctccgcgacgaaaccccaggtgatcgcaggactggtgatgcccgggatcaggatcagcgccgagcctttgccgccgtagcgcaagtaatgctggcgaatgccgttggcctgcacgttgccgccgtagaggaaggtgctcacgcggccacccccgatttcagtgcctgggcgtacaggtcatagccgtagacccaggccggatcttcctgggtgcgcagccaggtgttggcgttggacactgcttgcacccgcgaggcgcgttccttgcggttggcttcgtacagctcgaaggcggtgcggtagtcgctgatgccggtttcctgcaggcagcgggtgagcatggcggcgtcttcgatggccatgccggcgccctgggccatgtgcggcttcattgggtggcaggcgtcgccgagcagtaccaggcgaccccggctccacagcggtagcgggttgcggttgcgcagcggccatttggtcacgctgtcggtggattcgatcaaggcttgcacggtggggtggtagcccttgaaggcgtcgaacatctcttcccggctgctgtcgacgaatgcgccctggaagtcccattcggggtggggtacgccggtcacgtagtagtactcgtcgcgcttgccggtggtgtagtagaccatcatgtggcggtcctcggtccaccacttgatgcagtcttcgaacttgtggttgtacttggcgagctggtcgccacggatcagtgcgcggtgcgcgacccagccgctgtagagcggtttttccacgcccagcagttcttcgcggatcttggaattgatgccgtcggcaccgatcacgatgtcggcgtaggtcacttggccgtcggcgaaggtcaggcgcacctgggtgtcggtttcttcgaggctttccaggcgtttgttgaagtgcagggtgccgggcttgagggtggacatctgcagcgcatgcaggtcgccacggtgcacggtgatgtaggacgcgccgtagccggtgagcggaatgcgcgagaggtagtcgccggtttcaccgcagcggctgaaccagtgctcggggtgcgaacccatctggtccagctgcttttcgatgcccatgcggcggaagattttcatgatgttggggcccatgtggatccccgcgcccaaccgggaaaactccggcgcctgctcatacacatcgacgtcgaagccggcttgctgcaacagggtggcagcggcggcaccgccgagaccggcaccgacgatggcgattttttgagtgcttcccatggggcgtgttcctctctcttggtgattctttgtgatgttcggcggcaactgtctgcaaggtttttaaagtgtatacgctcattttttgaaatgggaagcctgtcttggcaaatttattttttggccatatttatcctgtgtaacgctatgtatctagcaaatgctgggcgtgtatcgataggtaacgttatagtgcgccgcttgcagtctgttcgcaattcggttcttatcgttattaaatggcgtatacgctataaaaatgcactagagtgaagcgcagtgcatgaacttggtgcagacccacaggagacaggaaaatgccggtaagcgattgcgaattgacccagatgttcgagcacgtgttgaagctgtccaaggtcgacccgacccagagcgtcgccgtgctcaagagccattactccgacccgcgcaccgtgcgtgccgccatggatgctgcgcagcgcctgggggccaaggtgtatgcggtggagttgccttcgttcaaccatcccaaggcgatgggcaacgacatgaccgcctactgcggcgacaccgcgctcactggcaatatcgccgcgcagcgcgcccttgaagcggcggaccttatcgtcgacaccatgatgctgctgcactcgccggagcaggagcagatcctcaagaccggcacgcgcatcctgctggccgtggagccgccggaagtgctggcgcgcatgctgcccaccgaggaagacaaggtgcgggtgctggcagccgagcagttgttgaagaaggcgcgttcgatccacgtcaagtcccgcgccggcagtgatttccgtgccgccctggggcaatacccctctgtgaccgagtacggctttgccgatgaaccggggcgctgggaccactggcccagcggcttcctgttctcctggcccaacgaagaaaccgccgagggcgtgctggtgctggacatcggcgacatcctgctgcccttcaagacctacacccgcgagaagatcaccctggaaatcgaaaagggcttcatcactaaaatccatggggggttcgaggccgaatacctgcgtgactacatgaagtacttcaacgaccccgaggtgtacggcatctcccatatcggctggggcctgcagccacgggcgcagtggacggccatgggcctgcacgacaagaacgacggcatgtgcatggatgcgcgggcgttctacggtaatttcctgttctccaccggaccgaacaccgaggtgggcgggacacgcaagacgccgtgccatatggatattccgctgcgtaattgcgacgtgtacctggatgatgaggcggttgtgattgcgggggatgtggttgccccagcaggctccctggcccgctgattaacccatgtgggagggggcttgcccccgatggcggaggggcagctggaaattagcttgctgatacaccgccatcgggggcaagccccctcccacatgtagactacattcgagcatgagaaacttgagtgcatccaacaacgaagccatcatgcttccccatcgccagccatccaccgagccccgccgtgcctgattcttacgtcttttctgaacaagttggccacctgctgcgcaaggcctaccagcgccacctggcgatcttccagcagaatgtcggcgactcccagctcaccgccgtgcagttcgtgacgctgtgtgcactgcgcgatcacggtgcaagttcgctgaccgagttggtcaaggcgaccgcagtagaccaggcgaccattcgcgggatcgtcgagcgactcaaggccaaggcactgatcagcctggaaccggacccgcaggacaaacgcaaggtggtggtggacctgtccccggcaggtgccgaactggttgcccagaccgcgccccgtgccgcgcagatcagtgaattgaccatgagcaatctcaacccggccgaacgggtggcggtactgttcctgttgcgcaagatgatcgacgatccccaggaatagtcactgctggcaccgatcttgctctaagttcgtgtagtaaccacttcaccagtcaagtgtgtcgcgaggccccaggtccgtgatgcttttttttgactgtttcatgtagtgattacttcaccaactgttacgggcgaagcacatgatcagccagcacatcacagtagcgcttgaggtcaacgggcaaacacgcgaagtcagcgctatggcggacacaccgctgttgctggtgctgcgcaatgacctggaactcaatggtcccaaatatggctgtggcctaggggagtgcggtgcctgcaccgtgatcatcgatggggtggcggcgcgcgcctgtgtgtttccgttgtcgggggccgtgggacgcgagattgtcaccctcgaaggtctgggcacgcgccaggcgccgcacccggtgcaacaagcctttatcgatgagcaggccgcgcaatgtggctactgcctcaacggcatgatcatgaccgccaaggccttgcttgaccgtaaccccaaccccagcgaagcccaggtgcgcaacgagctgtcgggcaacctctgccgctgcggcacccatatcgaaatcctgcgcgccgtgctgcgtgcggcccgcctgctgaccgtggattgatgaccatgccgaacattccgctttcccgtgaccaatggctggccaaggccggcgtcctgttgatcgtcgatgaggtgctgccgccttcggggccggtggccaagggtggcacgcctacggtcaagcccaaggagcttggactgtttattgcggtcaacgatgacggcctggtgtatgcgttcaacggccatgtggacctgggcaccggcatccgtacgtcgctggcgcagatcgtggccgaggaactggacctggcgatggaccaggtgcagatggtgcttggggataccgagcgcgtgcctaaccagggcgcgaccattgccagcgctaccttgcagatatcagcggtccccctgcgcaacgcggctgccgaagcccggcgttttctgttggcgcgggcagcgggacgctggggtgtgagtaccgccagcctgaaagtggaggctggcgttattcaagcgccagatgggcgcaccaccacctatagcgaaatggtcagcggccagcacgaccagctgcgcatcagcggtgacgcgccgttaaaggccattgaggactatcgcctggtgggcaagggcgccgcacgggtggatatccccggcaaggccactggcgaactgacctacgtgcacgacatgcgcgtaccgggcatgctccatggacgggtgatccgcccaccgtatgcggggctcgattgcggcgattttgtcggcaacagcctgttgagcgtggatgagtcctccatcgcccatattcccggcattgttgcggtggtggtcatccgcgattttgtcggcgtggtcgcgttgcgtgaagagcaggcgatcaaggccgccagcaccttgcaggtgcactggaagccctggaaccacgccttgccggacatgcgcgatgtcgagcaggccatccgcgacaaccctcgcgtacgccgcaccgtgcttgaccagggccatgtcgatgaagccctggcgggggccagccagcgcatgccgcgcagttacctgtggccgtaccagatgcatggctcgatcggcccctcctgtggcgtggcggattactcgccggccggcagccgggtgtggtcgggcagccagaacccgcacctgctgcgcgccgacctggcgtggctgctggagtgtgatgaggcgctgatcgatgtgatccgtatggaagccgccggctgttatggacgcaattgtgcagatgatgtgtgtgccgatgccttgctgctgtcccgtgcagtcggcaaaccggtgcgcgtgcaattgacccgtgaacaggaacacctgtgggagcccaagggcactgcgcagttgatggatgtggatggcggcctcaacgccgatggcagcattgccgcctacgactttgaaaccagttacccctccaacggcgcgccaaccctggcgttgttgctgaccggccgcgtggaaccggtggcggcgatgttcgagatgggcgaccgcacctcgatcccgccctacgacatcgacaacatgcgcgtgggcatcaacgacatggcgcccatcgtgcgtgcgtcgtggatgcgcggtgtgtcggcgctgcccaacaccttcgcccacgaatcctatatcgatgaattggccttcgccgccggtgtcgacccggtggaataccgcctgcgctacctcaaggacgagcgtgccatcgacctggtcaaatccaccgccgagcgcgccaactggacgccgcgcaccgcgccgatgcaaaccgccaacgacgatcacctgctgcgtggccggggctttgcctacgcgcgctacatccacagcaagtttcctggtttcggcgcggcctgggcggcatgggtcgcggacgtagccatcgacaagcagaccggtgatgtgtcggtgacacgcgtggtgatcggccatgactcggggatgatgatcaacccggctggggtgcagcaccagatccacggcaatgtgatccagtccaccagccgtgtgctgaaggagcgcgtgacctttgaggagtcgacggtggcgagcaaggagtggggcggctatccgatcctgaccttccctgaggtaccgcagatcgacgtgatgatgatgccgcgccaggaccagccgccgatgggcgccggtgagtcggcctcggtgcccagcgcggcggcgattgccaatgcgatctacgacgccaccggcattcggtttcgtgagctgccgatcaccccggagcgggtattggcggcgctgaatgccggcaccttgggcgagccggccaagtcgccggagaaacggcgcaaatggtggttcggcgcgttgttcgccaccttgggcgcggtgttggcgacggcctggcccttccacaatgaaatcgccccgattgcgccgcccagcgccggcacctggtccaaggccaccctggaacgcgggcgcttgctcgcggcagtcggtgattgcgcggtgtgccatacggcgccgggcggtgcgaccaatgccggtgggctggcgatggaaacccccttcggcacgctgtacagcagcaacatcaccccggacgtgaagaccggcatcggtgcctggtcgtacccggcgttcgagcgcgcgatgcgcgatgggattggccgcgacgggcgcaacctgtacccggcgtttccctacacggcgtttcgcaatatcaacgatgcagacatgcaagcgctgtatgcctacctgatgtcccaggcgccggtgagccaggcgccgacgccgaatgccatgcgctttccgttcaatatcaggccgttgatggcggggtggaacgcgttgaacctgcgacgcggagaaatcaccccgcagcctgagcgcggcgagcaatggaatcgcggcaattacctggtcaatggcctggggcattgcgcggcctgtcattcccctcgcaatgtgatgggagcggagaagggcggcaaggcgttcctggccgggggcatggtcgatggctgggaagcgccggcactgaccggcctgtccaaggcgccgacgccatggaccgaagatcagttgttcacctacttgagtaccggctattccgatgcccatggcgtggccgcaggcccgatggggccggtggtgagtgagttgtcgaaactgcccaaggcggatattcgcgccatggcggtgtacctggcatcgctcaatggcgaagccgcagccgaggcccaggtggcggcggcggtcagcgtgccgaatcccaatggccgacgcgtatttgaaggttcatgcaaggcctgccatgccgatgggctgggaccgaagctgtttggggtgagcccgtcgctggcgaccaataccaatgtgcacagcgaccagccggataacctgatcaaggtgattctgcaaggcatcagccacccggcgaccaaggacctggggtatatgccggggttcaaggacagtttgtcgaacagccaagtggtggatctggcggcgtatctgcgcgggcaatttgcgccgaatacgccgcagtggaaggggttggagcagaaggtggcgcatctgcgtgccaaccccggcacccattgacgcaatggggtaaaacaggtgggagggggcttgcccccgatggcggtgggtcagctagacataggctggctgatgtacctgtatcgggggcaagccccctcccacattttgattgggtgtttacagggagggcggggtgacgccacgtatcactaaatcactgataaaactcagccaatcctgctgctgccctttgttcgccaggtcttcaccgaggaatgagctgagggtatgccggttggagttatagaagtagcacagcgaggcgatcatcaagtacacgtgcttgaggtcgacatcctggcgaaacaccccctgggcctggccggcttcgatgatcggctttaatacgcccacggcttcaccggacaacctgcgcatctcgccggattgctgggcatgcttgccttggtgcaggttctcgatgctcaggatcgccacgaattccgggtgcttgacgtagtaattccagataaacgccaccaggtcgcgcagggcctgctccggtgcgtccaggtccagcttgagcttgctttcggctttgttgaactgctcatagatgtgttccagcacgcagacgaacaggtgttccttgctgccgaaatagtaataaagcatgcggtcgttggagtcggcttccttggaaatggtgtcgacacgcccgccggaataaccgtcacgggtgaacaccttgaccgccgcctggaggatgcgcgcgcgggtctggtcggcctgttgggcgcggatgccggtcttcttgatcatcaccatgtcagagcgccttgcgggacagtcagggcgcgaaatatagcatgggcgttttcaggtccgttctgtgaccgacaagttctgtaataaaaacgccattgcgctggggattaaatccgcaacgggctattttggtgcgtcccaataactagagtagccatggatgaaataccaacctttcagccgtaccttgattgccacagccctggtgttgaccgtcagtggtgtgcaagccgcttcccaggccccggtggccggtgaaaatggcatggtggtgacggcccagcatttggcaactcatgtgggtgtagatgtgctcaaggccggcggtaatgcggtcgacgctgccgtggccgtgggctatgcgctggcggtggtgtacccggcggcgggcaacctgggcggcggcggtttcatgaccgtgcaactggcggacgggcgcaagaccttcctcgacttccgcgaaaaagccccgttggcggccaccgccgacatgtacctggacaaggacggcaaggtcatcgacggcctcagcgccaagggccacctggctgtcggcgtgcccggcaccgtgtcgggcatggagctggcgctgagcaagtacggcaccctcaagcgcgcccaggtcatcgccccggcgatcaagctggcggaaaacggctttgcgctggagcagggcgacattgacctgctgcacaccgctaccggcgagtttgaaaaagacaaggacatgcgcgggattttcctgcataacggccagccgatgcaggtcggccagaagttggtgcagaaggacctggccaagaccctcaaggaaatctcggccaagggcagcgacggtttctataaaggctgggtggccaaggcgctggtggattccagccaggccggcaagggcatcatcacccaggctgacctcgacaagtacaagactcgcgaactggcgcccatcgagtgcgactaccgtggctatcacgtggtctcggcaccgcctcccagctcgggtggcgtagtgatctgccagatcatgaacatcctcgaaggctacccgatggctgatctgggctatcactcggcccaaggcctgcactaccagatcgaagccatgcgccacgcctacgtggaccgcaacagctacctcggcgacccggacttcgtgaagaacccgatcgagcacctgctggacaaaaactacgcggccaaactgcgcgacgccatcgaaccgcagaaggccggtgactcccaggcgatcaagccaggcgtgtcaccccatgaaggcaacaacaccactcactattccatcgtcgacaagtggggcaacgctgtgtcggttacctacaccctcaacgactggttcggtgcgggcgtgatggcgagcaagaccggggtgatcctaaacgatgaaatggacgacttcaccgtcaaggtcggcgtgccgaacatgtacggcctggtccagggtgaagccaacgccatcgcaccgggcaaggcgccgctgtcgtcgatgagcccgaccatcgtgaccaaggacggcaaggcggtgatggtggtgggtacgccaggtggcagccgcatcattaccgcgaccttgctgaccatcctgaacgtcatcgactacaagatgaatatccaggaagccgtggacgcgccgcgtttccaccagcaatggatgccggaaaccaccaacctcgagcggtttgccgtgagcccggacacccagaagatcctcgaaagctggggccacaagtttgccggtccgcaggatgccaaccacttggcggcgatcctggtgggcgcaccgtcgctggatggcaaaccggtgggtaacaaccgcttctatggggcgaatgacccgcgtcgcaatacggggctgtcgctgggctactgaggcgtgaggtggtgatgcaggtgggccagggacagcgccaggctgtcgtgggataactggatggcggcgccttcggcgctgccctgggccgccggtatcacccgttcgaacatgtggttttcataggcctgcactgcggatgagcagtcgggtgtctccagcaggtgctgcgccagttcagccgcatccagcatcgccgcgttcaccccttcgccgccaaacggcgacatcagatgggccgcatcgccgatcagtgtcaacccctggcggtgggaccagcgatggccgacgggcagggcgtagatcggtctcgccagtaccgtctcgttcgccgcatcaaacaatgccaatacctgcgggtgccagccatggaactgggctttcagtgcgggcaggctgaggtgatcggctgcccagtcggacggtacacggaagatcgcatagccgcgcaaatgcgcgttggcgttgcgctgcacgatgatcgccttggcttctccggtaacctgcagggtgcctcggccaaccagtccggcgagatgcgggtgctgacagtctgcatcgtcgatgccgaattcgataaaggtcaatccgctatattgcggctgataggtcgacagcagcgggcgtattttcgaccaggcgccgtcggcacccaccaccaggtcgaagggcccgtgggtgagcgcgccctgatgaagtgcccagcgtccatcgccggtcggacgcacgtcggtgacgctgacaccccagctcacacagtcttgcggcagtgaatccagcagcgcctggcgcaaggcggtgcggtcgacttcagggcggtcgcctgcgctcgggttgggggcttcgaacagcaagcgcccatgctgatccatcaagcgcgagccttggtcttcgtaacgggcgatgcgtttgaacgcgtcctccaggccggcacgctgcaaggcgagttggccggattcggcatgcaggtcaagcgtgccaccttgtgggcgctccagcgggctacgttcacgttcaaacacgctggcgttgacgccatggcggtaaaggattcgcgccaaggtcaacccgccggggccggcgccgacgatggcgatgcgcaacgaggtatgcatgaagttgtccttggcgatgtttacaggatcctatacatttagttcataggatcctatggaaagtcaacgccctcatgaagattcaaacgcctgctccaaaccccatgcaacagatcggcatggcgaaccgggggttcatccgcctctacgaaggtcgcctgagagcgctgggctttgctgtcgcgcagattccggtgctggtggcgctcaagcgcagcggggggttgccgcaggccgaactggtgcgcatcgcccgtgtcgagcaatcgagcatggcccagttgctgggtcgtatggagcgtgacggcatgatcgaacgggtggctgacccggctgacaaacgcagccgcttgattaccctgaccgacgcggcgcgcgaacgcatgcccgccgcccgcgcgatcatgctgcaaggcagcgcgcaggcgctggaggggttcagtgaagaggaggaggcgaccttgctggcgttgctgctaagggtgaatgccaacctggagcgtgccggagagtagctgttcaaccactgcaaatgcgctggcgcggcgctgtgcccaatgaccacgaatcaccagggcgggctgctgatggtgctcgatccactccaggccgcctcggaagaacgcttggcggtcggccagctccggctggcagcgctggccgtcggcggtccattccacatcgtccggcgagagcagcaggtgcaggtcgtagtggcgggccagcagttcgctgtcgagccaggtggggtagtcgccgaacagggtctggctccagagcttgttggtcagcaggtgggtgtcgaggatcagcagttcgggctgccgggcgcgggcggcgtcttcccaggccagttggcctcgggcaatggccgggatgtcggccagggtggtgtcgcgctgatggtgatcgatgaaatggcgtacgtattcaccgaccatcaacccgccgaaatgcgcttgcaactctgccgccagccagcttttaccgctggattccgggccggccagtaccaccaccttcatgggtgcaacgccgggtcggcgcgccattcacgccagccttgcacggcgatcacggtgaacagcgcgtagagcgctgcggtgaggtacaggcctttgtagaggaacagcccgacgaagatcacatccaccgcgatccacagtggccagcactgcacacgtttctgcgccatccacatttgcgccaccaggctgaagccggtgagggcggcgtcgagccagggctgggcggcatcggtccagtgggccatggccgcaccgagcagcaggctgcccaccgcacccacggccaggctggcgatgatcgccggcacgcccaggctggtgacctggcgcccttgcttgacctcgccggcgcgggtccactgccaccacccgtagacctgcagcgcggcgtagaccacctgcaagagcatgtcggaatagagctttacgtcgaagaacacccaggtgtacagcaacaccatcaccagcccgatcggccagcaccaggggttttgcttgaccgtcagccataccgcgatcaccccgagggcagcggcgaacagttcaagcccggacatggtggttccttgggagagtgggagagggcggggattgtaaccaaagaagaatgctgcgggcattatctctgtagtgagcgggcttgccccgcgttgggctgcgtagcagccccataaatacggcgcgtactgcctgacagtaagcggtgtctggttttagggctgctgcgcagcccaacgcggggcaagcccgctcgccacaacaagcccgctcgccacaagcagcatcagattttgaattggcgcagcaggccgtcgagctgttcactcaggccacgcaactgtccactcgccacgctcgattgctccgccgccagcgcggtgctgtgggacaagcccgccgcctgggtgacgttctggttgatgtcttccaccacatgagcctgttgcagcgtcgcgctggcaatcgaggcgttgaggccgttgaggttgcgcagcgcctggccgatggcggtcaggctggccccggcctggccggcttgttcgatggtcagttgcgaggcgctgtggctgtcgctgatcaccttgaccgcggcttccgaatggccttgcaggcgttcgatcatgccctggatctcggcggtggacttttgtgtgcgctgggcgagcagccgcacttcgtcggccaccaccgcaaagccacgaccttgttcgccggcgcgggctgcctcgatcgcggcgttgagggccagcaggttggtctggtcggcaatcgagcggatcacttcgagcacgctgccgatctgggtgctttcggcggacagggtgcggatcacctccaccgcctggctgatggtgccggagagctggtcgatctgctgcaggctgccgtcgatattgacctggccttgctgcgcctgggcctgggcgtcgcgcatttcgctggcggcgtgttcggcgttcttggctacatcctgcacaccgtaggtgacttcgttgatggcggtggctaccagttccatctgctgggactgctgctggctgcgatcatgggcctgggtcgcattggtgcccagttcctgggacgactggcccagggcgttggcgcattcctgcaactggctgaccacctggcgcagcttggcggtgaagctgttgaagtgccgggccagttgggtgacttcgtcctggccgtgggtgtcgaggctgcgggtcaggtcgctttcgccgctggcgatgttgcccatggcgttcaccgcgtcctgcaacggccgcacgatgctgcgggcgatcagcgctaccagcaacgccatgagcaccgcgatacccaggccgataaacgaggctttccacacctggccgctgaactcggcctgcacatcgtccacgtacaccccggaaccgatgatccagccccacggctcgaacagttggatgtacgaggtcttggccaccggcgcttccgcacccggtttcggccagcgatagttgacgatgcccgcgcccttggccttggccaggctcacgaattcgttgaacaccgcaaaaccgtcggggtcgcggatggccgagaggttctggccgtcgagcttggggttggccggatgcatgatcatcacgggcgtgaggtcgttgatccagaaatagtcgtcgtggtcgtagcgcaagccgcgcacggcactcagggcttgtttctgggccgcttcgcgggtcatcacgccggtggtttcgaggccgtgataaaacgtcaggatcccgctggcggtctggaccacatgttgggtctgttggcgcttggcctggtaaaggtcgccgtggatctgcttgagcatcagcaaacccagggccagcagcatcagcacggcgactatcaggatcagccagagacgccggctgatcgacatattgcgcaaactgttcatcgtcctgtcactccgtgctttttataattgtgggcgccgcatcgacttttccgccttgtctgataggctttcggcctgtattcggaaaacctgaatactgtctgatttttcacaagatttttgcgtgccggggttgagaatcagccccgggtcttgtcgtcagtgaaccattaaaaagatcagcaaggcttgccatagagcaagacctttgggggaagcatggatttttggaccgccatacaggcattgattcttggcgtcgtggaggggctgaccgagttcctgccgatttccagcaccggccaccagatcatcgtcgccgacttgatcggcttcggcggcgagcgtttcgaggccttcaacatcatcatccagctgggggcgatcctcgccgtggtctgggagtttcgccgcaagattctcgacgtggtcatcggtttgccgagccagcgcaatgcccagcgctttacggtcaacctgatcattgccgtgttgccggcagtggtattgggggtgatcttcgccgacctgatcaagcactacctgttcaacccgatcaccgtggcgaccgccctggtggtgggcggcatcatcatgttgtgggccgagcggcgccagcaccggacccatgccgagagcgtcgacgagatcacctggaaagatgcgatcaagatcggcttcgcccagtgcctggccatgatccccggcacttcgcgctccggtgcgaccatcattggcggcctgctgttcggcctgtcgcgcaagaccgcgaccgagttttcgttcttcctggccatgccgaccatggtcggtgccgcgctgtactcgggctacaagtaccgtgacctgttccagccggcggatttcccggtgttcgccatcggcttcgtgacctcgttcatcttcgcgatgattgcggtcaaggggttgctcaagttcatcgccagccacagctacgcggcatttgcctggtaccgcatcgggttcggcctgctgatcctggcgacctggcagttcggctggatcgactggacggcggtcaagccttgagcatccagtatccgcgcttgaaggcggcgatctttatagtgttgtgcgcagcgccgttgataggggccgccctggtctggtatcgcggcgagacgctgatcccgctggcggcctatggcgtggtcagcgtgattgcgtttttcctgtactggagcgacaagcgcaaggcgcagagcgaccgctggcgcaccccggaaaacatcctgcacgccgtagagctggcgggcggctggccgggagcgttgattgcccagcaggtgttccgccacaagacgcgcaaggtgtcttaccaggtgctgttctgggtgatcgtgttgctgcatgaggtgttctggctggaccagttgttcctcggcggcactttgctctcagtcctctagcagcaacccgacctgcgtgcgcttgggcaacttgctcactaccaactggtgggagcgttgcaacaagccacgcagttcttcggcgcccagcgggtagggcgtgttcatgatgacccactgcgcacgcgccaggtacggcgccgggtggatgcccgggcgatccacatggccgaggaacagctccttgtcgaccttgaacgccagcgagtcaccgcgcaggttttgcagggcgaacatcttgttgccggcaatcgagaacacccgcactccaccccatttgtagtcttcgcgcgcgccgggcagtgccaggcagaacgccgcgacttgtgcttcggtcatcttcatagcaagcggtctccacagcctttgaagccttcctcaaggtagtcgatccaggcgcggatcgccggcagcacgccgcgccgatgcgggtagaccgcctgcagccaaccgcccggcaacgaccattcgggcagcagttgcaccaatcggccgttcgccaattcctcttcgcagtacatcatcggcagtacggtaaagcccaggcccatgatggcgctggctttacgcacgataaaatcgtcgatacccaggcgggcttccatcgccaggtcgtgggcgttgccctgggggtcgagaatgcgttgatgcaccaggcggtccgcctccagcgcgccgagaatcggcaactgcttgaggtcatccagggtcgcaacctgacgcccgagcatcagcgtggggctggccaccagcacggtctgggcctggcgcaggcgtttggtcaccaacagcgggtcttcatcgccgagttcgcgcacgcgcaaggccacgtcgatgccttcggccaccaggtcgacgcggcggttgaccagggtcatctccaactgcacctgagggtgggcggcaagaaaaccggcgaccagctccggcaggatgtgctgggccatgcccaccgggcagctcacccgcagtcgcccacggggctcgctggacatgctggccacggcctcatcggccatttccgcctccagcagcatggcctggcaatgacgcaggtagcgctcgccaacggcggtgagggtgagttgacgggtggtacgttgcagcaggcgtgcgccgaggcgctcttccagctcggcgatgcgccgcgacagccgcgacttgggaatccccagcagccggccggcggcggcgaaaccgccggcttcgacgactttggcgaaatagtagaggtcgttgaggtcttgcatgatcaacctattgtcctgtcaatgggacgaactatccgcgcctgacgagggcaaatccactacaaatgcgcaccgcccatcaacacatacttcacctgcacgtactcttcgatcccgtagtggctgccttcacggccataaccggactgcttgatcccgccaaacggcacggacgcggtgccgaccgaccctgagttgagaatcaccatgccagcctccaattggcgcgacaggcgcaacgaccgccccaatgcgctggtgtaggcataggcgaccaggccgaattccgtctggttggcgcgggcgatcacttctgcttcgtccttgaacgagtagatggcgaacaccggcccgaagatctcctcggtggccaggggggagtcgtcctgcaagccggtcaatatcgtcggctcgtagaacaggccgcccttggcgtggggtttgccgcccatcagcacgctggctccggcagccttcgcggcctccaccaggcgcacgaccttgtcgaaacccgcttgattgaccaacgggccgaccacaaagccttcacgcaggccctggtccacttcgatctcggccacggcgtgcttcacgcgtgtgatgaagtcgtcgaggatgctgtgctgcacaaagatccggttcggcgagatgcatacctggccggagttgcgcagcttggcaccgaccagtcccttcaccgcctcatccaggttggcgtcctggaacacgataaacggcgcgttgccgcccagctccagggtcatcttcttgatgctcgccgcgcattgtgcggcgagcaatttgccaacgccggtggagccggtaaacgagatcttgcggatacgcgggtcgcccgtgaggatcaggccgatcgccttgggatcgcccactaccacctccagcacgccttccgcgatcccggctttgcgggcgtattcgagcaatttgaacgcggtgagcggcgtatcctcggcaggcttgatcaccatggtgcaaccggcggccagggccgtggcgaccttgcgggtgatcatcatgaatgggaaattccatggggtgatcgcggcgaccgggccgatggcctccttggtcaccagcacagtcgcgttgcggtcatgggtggggatcgtgtcgccgtacacgcgtttggcctcttcggcataccactcgataaaacccaggccgtagtcgatctcgccacgggcttcactgaggcatttgccgttttcgcggcagagcaattcggcgaaggcttccttgtcggccttgaccgcgtcgtgccagcggcgcaggcggtcgctgcgctccttggccagcctggatgaccaggcgggaaaggcggcgcagacacggtcgacggcggctttgacctggctgctggtgttctgggcgacgcggccgacttcttcaccggtagcagggttgtagacgataagcatggggagtctccgagggctgaaagtgctgtttcaggctacgcagagacagtgtttgagcgaatatccattccaatgtgctgattgcctattcctatgaggacgtagcctggatgtggattgcgcgttaccgtggcactttgcacagaggcctggatccatggaccgtacagacagaatcatcgcgctgatggacgccctggcgcctgtcgagggctataacctgagcgcactggacgacgtgcgcttcctgcgctccaaccgtccgttgcagcgggtgccggtgctgtacgaccccggcatcgtgattgtctgccaggggcgcaagcgcggatatctgggggatgaggtctacctgtacgacgcccagcactacctggtggtgtcagtgccggtgccgttcaccatggagaccgacgccagtgaagccgagccgatgctggcggtgtacctgcgcctggacttcaccctcgcggcggagctgatggtggcgctggatgagtttccagcgctggtcgacgccaagccgcgcggcatgtattcatcgcccatggatgacttgctcggtgagtcgttgttgcgcttcctgcaagccatgcgcacgccgatggacgcgcacatcctcggcccggcgctgatgcgcgaaatctactaccggattctcacgggcgagcagggcggttcgatgcgcgccgcgttgaatcgccaggggcagtttggcaaggtggcgcgggcgattcgcaagatccatgggtgttatgcccagcacctggacgtggaggcgttggcccgggaggcgatgatgagtgtgccgagctttcacgcgcatttccgcacggtcaccgacacctcgccgatgcagtacctcaagtccacgcgtctgcaccaggcgcgtttgctgatgctgcgcagcgatatcagcgccgccacggcgagtgccaaggtcggctatgaaagcgcatcgcagttcagtcgcgagttcaagcgcttcttcgggcgcacgccccaggcggaaatccagtggatgaaacgcacctatgcgttgccggcgcctacgtcggcgtcgatgtacgtctcgtcccattgagcagggtcagcagcagcgccaacccggcgaatgctgcgccggtcagcgcctggccttgccagccgtagtgcgctgaggcaaaggcgccgctggccgagcccagggcgcccccgatgaagtagaccaccatgaaaacggtgttcaggcggctggtggcggccggttccagggccagcacgcgggtctggttggcgagctgattgatacggttgccgaggtcgaggaaggtcgccgcgatcaggatcggccaccaccagccctgggggccgaacaggtagatcagcacgaaggccgccagcacggtagtaataccgagccattccagaaaaccgccgtggcgccgagtctgccggccgatggtcgaggcgcagagaatgccgacgatggcggacaacccgagcaggcctgcctgggcgctggagaacccgtagggtggcgcggccagcagcgcggccatggagccccagaacacgttcagcgcaccgaaaaccagtgcagccttgatcgccgattgccgcagggtggggtactgcgtcgccaggccccacagggactttagcaaggctccgtacgccagtttgctggtggagaccgaggcgggcatgcgcgtcaggattgccatgaacagcagcacatccagtgcggcggcgagggcgaacatgccgcgccagcccagccagccgctgaccacgccgctcacagtacgcgccagcaggccgccggcggacaggccgctgaccatcaggccaagcaccgcgcctttttgcatggggtcactgaggtcggacgcggcggggatgatcacttgggcgctgatacccgagaggcccagcagtacgctggccaccagcaacacggcataggagggggcggtggccgaggccagcaggctggcaaagttcaggcacagcaccgcaagaatcaaggtgcgacggctgatgcggtcgcccagcggtacaaacagcaacagcccgcaggcgtaacccagctgggtgagcatcgcgatctgcccgacatgggcggtggacaccccaaatgtgtccgcaatcagcggcagcatggcctggttgtaataaatcgtggcgaccgaaaacccgcagcagatggcgagaatcagggtcaggcccttggtcagggctggggcgtgtggctgcatggcgggctcagtggtgatcgcaatggcggcgagaatgcagcgaagctggcgccaaatccagcgttgcagaggatcgggcaataactcggctggatcaggccatgctgtgcttggattgtctcactggcgggacaaacagtcgcgtttcaacggtctaatcctttattcggatcatctgtaggattaacctcacttgatcgccccaccgcgatcctcacttggagatcccgcatgaaactgttgcatatcgattccagcattctcggcgacaactcggcgtcccgtcagctcagtgcgggcgtggtcaaggcctggcaagcggctgaagcgggtgtggaagtgacctaccgtgatctggccagcgaaggcatcaaccacttttccggcgcaaccctcggtgccttgggcactgccgctgagctgcgtgatgccgcgcagaagcatgaggctgacctgagcgcttcgtcgctggctgaattcctcgctgccgacgcggtagtggttggcgcaccgatgtacaacttcaccattccgacccagttgaaagcctggatcgaccgtatcgccgtcgccggccagaccttccgctacagcgaagccggccctgaaggcctgtgcggcaacaagaaagtcatcatcgtgtccactgcaggcggcctgcacgccggccaggcatcgggcgcggcccacgaaggctacctgaagctgttgtttggcttcctcggcatcaccgatatcgaaatcgtgcgtgccgaaggcctggcctacggtgatgaagtgcgcagcaagtccctgaacgacgccaacgtagtcatcaacgaacaattgttcgccgccgcgtaaggcttgtgtaaattccgcctttgctcggtttcattctgaagccgggcgcctaaactctgtattctgctcgcctcaaaacgaacggagtacggagttttttcgtttagccgctgtcattactttggcccaggttgtgcaagcatgggtttaacgccctggacttttttcgatatgtttgttctcacgcagcaaaggtggacatccccatgatgcgtctttgtgctgttatggttctttccctgctcggcggcctgatttcagtgcacgccgcacccgcgccgcacccgcattggagtgtgggctttcatcgcatgacgtttctcgatccgctggacctgcaacccatgaaggcgatcgccttctatccctctaccgatctagagcacaccacgcaattaggcgcctatcacgtcgccgccaccgaagattccaagatcgccatcggccgtttcccgatgctgatgctgtcccacggcaacaccggtacgcccctggcactgcatgacctggccacctccctggcgcgcaaaggctttgtggtggtggcggtgctgcacccgggtgacaactacaaggatcacagtcgcctgggcacggtgagcaacctgtacggtcggccgatccagatttccgaagcgatcaccgccacccttggcgacccgatgctgtcgccgttcgtcaacgtcgaccaggtgggtgtcattggttactcagccgggggtgagaccgcgttgatcctggccggcgccaagccggatttcgaccgcctgcgccggtattgccaggagcgtccggaagatcgcgacgcctgcaccaccaagggcgaactggtggtggaccgtgacgacctgcaaccgcaatccgacccgcgcatccatgccctgatgttgatggcgccgctgagcctgatgtttggccgccataccctggccgatgtgcatgtgccggtgctgctctacagtggtgatggcgacaagttggtggcggtggataagaacgccgctgcgctggcgcgcaaactgccggagccaccggacttcaagctgttggccggggcagggcacttcgtgttcatggcgccgtgcgacagtgatcagttggcgacgatgccggcgatttgcaccgatgccgatggggtcgaccgcgaaggcattcaccgcgacctgatctccgaggcggggcggttcttcagtcacaccctcggccaatccacccgcgcaggcttgcagaccgctgatcagtaagcgcggcgcataagcagcagggtcacgcccagggccgtgaccgacaacagtgcggcacagaagaagatccagccgtagccgaggttgagcgccacggcgcccatcaacggcccggcaatcgccagggccaggtcaaaaaacaccgcatacgcgctcagccccgcgccacggctgctgttgggcacctgcttgatcgcttccacacccagcgcggggtacaccagcgacaagccgaagccggtcagcccggcgccgatcaatgccactccagtggacggcgccagccacagcagggtcaggccgagggtttcgatggtcatgcaggcaatggctgcgcggaacccgccgaaacggctgatggcagagataaacaccagtcgcgacaggataaagcacacgccgaataccgtgaggcagtacgccgcgccggcccagccgcgattgaggtagtacagggtgataaaggtagtgagggtgccgtagccaatggacgccaggcacaggctggcgccaaacggcgcaattcgcccgaacacggcccagaacggcaggcgctcgccgcgcaccactggcaccgagggtttattgcggatcagcagcaacccgagtgcggacaatactgtcagtgcgatgccgaggctgttgtagccatattccgcgaccatcaccacgccaagcggtgcgccaatggcgatggcaccgtaggaggcgatgccattccacgagatcgaccgtgcagtgtgttccgcaccgacggcgcccatgcaccaactgatggtgcccacgccgatcaggccttgggccacgcccagcagcagccgcgcaacgatcaggatacccaggctcaacgatggcaggcttgccaccagcgtggcgaagaacgtcagtacgccactcagcagaatcccggccaggcccagcacaatcgcacgcttggtgccgacgttgtcggacatgcgcccggccatggggcggctgagcagcgtcgccaggtactgcgaaccgatggtgatccctgccaccactgcgctgaaacccagttgctcatgcacatagccaggaattaccgcaatcggcaggccgatgcagataaatgcgatgaaggtgtagaagacgatggagacgatctgcagggtgatcgatatcgagctgggggcggcggcaggcatgggcactcgttcgcgggcgggcggtgcgggcatgatggcaagggcgcgggggaaaaggaagctggctaactactttgtctgatgaaccggctttgcgcggtaaacgatgccgttgtggtgagcgggcttgccccgcgttgggctgcgaagcagccccaatagaaaacaccgcgttctgtcagacagagcgcggtgtttttttagggccgcttcgcgccccaacgcggggcaagcccgctcgccacaacaagcccgctcactacaataaatcgagtgctttagaacaccacaccctggctgcgcaggtaatcgtcataggtgccgctgaagtcgatcacgccgtcggcgctcaactcgatgatgcgggtggccagggacgagacgaactcacggtcgtggctgacgaagatcagcgtgcccgggtagttctccagcgccaggttcagcgcttcgatggattccatgtccaagtggttggtcggttcgtccatgatcagtacgttcggcttttgcaggatcagcttgccgaacagcatgcggccttgctcaccaccggaaatcaccttgaccgacttctggatttcgtcgttggagaacagcatgcggcccagggtgccacggatcatttgctcgccttgggtccactggcccatccagtcgaacagggtcacgtcgtcttcgaagtcatgcgcatggtcctgggcgtagtagcccagttccgcggcgtcggtccacttgatgctgccggcgtccggggtcagttcgttgaccagggtgcgcagcagggtggtcttgccgataccgttcgggccgatgatcgccacgcgctcgccggcttcgacctggaagctgaagtccttgaacagcggtttgccgtcgaagcctttggccattttttcgaccatgacggcctggcggtgcagcttcttgttctgctcgaagcggatgaacgggctcacccggctcgatggcttgacttcggccagctggatcttgtcgatcgccttggcacgggaggtggcctgcttggctttcgaggcgttggccgagaagcggctgacgaaggattgcagttcggagatctgcgccttcttcttggcgttgtccgacagcagttgctcgcgggactgggtcgccacggtcatgtactcgtcgtagttgcccgggaacaggcgcagctcgccgtagtccaggtcagccatgtgggtgcacacgctgttcaggaagtgacggtcgtgagagatgatgatcatcaggctggagcgctgggtcaggatgttttccagccagcggatggtgttgatgtccaagtggttggtcggttcgtcgagcaacagcacttcaggatcggagaacagcgcctgggccagcaatacgcgcagtttccagcctggagacacttcgctcatcgggccgaagtgctgttccaggggaatgcccaggcccagcagcagctcaccggcgcgggattcggcggtgtagccgtccatctcggcgaactcggtttccagctcggccacggccatgccgtcttcttcgctcatttccggcagcgagtagatgcggtcgcgctcggccttgaccttccacagctcttcatggcccatgatcacggtgtcgagcacggtgaattcttcgtaggcgaactggtcctggcgcagtttacccaggcgtacgttcggctccagcatgacctggccgccggacgggtcgaggtcgccgccgaggattttcatgaaggtcgacttgccgcaaccgttggcaccgatcaaaccataacggttgccagcgccgaacttgaccgagacattctcgaagagcggcttggcgccgaactgcatggtgatgttagctgtggagatcaattactttacctatcaatgggttgcgagcgtgtcggcaggagccttcaggcatgcgtcaacagcgacatcaaggcgcgaaacccggtcgctgagcagaaaatgggggatgtgtgttggaatttggcgcgcattgtcgcatatgtcaggcgacagttgtatgtccggcgaaggaaggtttcgccagggtctccggcattgccagccataacaacgccaaggccagcgctgcgaccccggccagagtcaggaatgccgcgttgtacccggcctgttgcaccacgaaacccgccaggctgctgctcagtgccgcgcccagaccaaacacggtggaaagggcgcccaggctgacgttgaagcggccggtgccctgggtcaggtccttgacgatcaccgggaacagcgcgccgaagattcccgcgccaatgccgtcgagcatttgcacggccaccagccaataagggtcgctggacaaggtgtagagcacgccgcgcagcggcaggatcatgaaaccggccatcagcagcggtttgcgcccccacaggtcagccttgagcccgaccagccaggccatcggcaccatcaccaactgggcggcgacgatgcacgccgaggtcagtggcgtggccatctgcaggttgatctgcgacagcttctggctgaccagcggcagcatggcggcgttggccaggtgaaacagcgcgcagcagatggcaaacagtagcagcgggcgattcgccagcagcactttcatgccggatggttgttcatggtcggtgtgatgtgccgggtcgaagccgcgggccacttcatggtcgatggcctcggcggacacacagctgatcgcaacgatgctggcgagtgccatgaacgccatcaggtaaaacaccaccactggaccaaacaagtaggccaggccgccggccaacagggcggccacggcattgccggcgtggttgaaggtttcgttgcgtccggtgcggcgggtgaacgcgcgcggcccggtgatccccagggagatcgcggaaatcgccggtgcaaacaccgaggcggcgacggcactggcggcctgggtcaatgccaccaggctgaacgagctgacaaagggcagcagcaggcaactggcggttaccacaatagcggccagcgcgatcaccgcgcgcttgctgcgggtgcggtcgatcaatgcgcccgccgggccttgggtgatcaatgcggcgatacctgccagggtcatgaccacgccaatactggccgggtcccattggtgcacggccagcaggtaaatggccagatagggtccgaggccgtcgcgtacatccgccaggaagaaattcaggctgtcgagggacaaggtgttacgcaggtcggaatgtttggccacggcgagcacttcgcaagcggtgttcaaggactgaacacgcattgcgttagtgacccgcaggcgttgcgttaagtttcgtgcgttagccgggttttattccgtgggtacatggcttattttctgagcccctctgtatggattatctggagacgcaatggacatgccctcagctcaacaggcgattgcctgcaacaaagacgcctgggatcaatcggccggcctgcacaagaccaccgacacctggaacgcgttgctcaatagcgtcggccaagctgacttttcctgcctggatcctacgattaccgggctgctgcaagacgttggcgtggccggcaaagatgtggtgcaactgtgctgcaacaatggccgcgaaagcctgtcgctgtttggcctgggcgcacgttcggtggtgggcgtggaccaatccccggcgttcctccagcaggcctgggagctggccgatgtctcgccgcacaaccctgagtttatcgagagtgacatccatcatctgccgcaggcgttacacgggcgctttgacatcgccctggtgacaattggggtgctgggctggatgccggacgtggcgctgttcatgcagcaggtcgccctcaccctgaaacccggcggcaccttggtcatgtatgaaacccacccgtttctggaggtgttcgatccacgggcgccaaacccgttcctgccggccagttcctacttccagcacgaacccttcgtactgcaggagtcgattgtctatgaggggcagggcgaggtggccgggccgacgtcctattggtatgtgcacaccctgggcgatgtggtcagtgccgcgattggcgcccagttgcagatcgttcacctgcaggagtatccccactccaaccgcgaagaactctacgaccaatacgagcaccagcccgcacaattaccgatgtgctttaccttgaccgctaccaagcgtctcgactgaggcgtctttcagtcgcggcgcacgaacgtgcgcatggtttgcccagggcctgtgctgaacgtggttggcctgggcataccttcgtcggcggcaatgaacacaaattcatcaccgtcgaggcgataactggcgggcaagtgtttgccggcgtcatctcccatggagtcgatccaggtaatgcgcttgggcactgtgctgctgtcgaggaaaaaacgtcctgccagcaatacctcgccgctgaccgtcttcacttcgaagccgtcgccgctgatcgtggtgattgcgccaggggccgtgtgcgcgtcgatggggttgagcacgccgctgtcttcgagtgaggtttgctcccacgcaccttgcagggcttgaaagtctgggtctgaaagggatgacatacaaattcctttttgttgaaggggaaatcgtcgatggcgatgccttttatcatttgaagctggattacgcagcacattcgcaagacagcttttcacaattcttagttaacttttggttacaacctgtggctaaataactgcaaagggccacgcgccgggtggtcactcagccggtcgtgccgattgtgtgaattgtgatttcaggtgctgctatccatcctcgtccgttgtgggcacgcaggagcagcctgttctcttctgacttgtgacgaaatcccttgaaactcatcattgttgttctctacgttgcctcgattgcgtatgtacacttacgtggccgggtgcggcataagctgggccgccaactcagcgatcattcgaccttcctggcgccgatcaactgctttctctatctcttctctaaactacccagccgaccctacctgtcgcccaacgatttccctgacctgagcccgctccaggaacattgggaagagatccgcgaggaaggccagaacctgctgcgcgccggcgaaatcaagcgctcggagcagtacaacgacgtgggtttcaactcgttcttcaagtcgggctggaagcgtttctacctgaagtggtatggcgacagccacccgtcggcgatgaagctatgcccgcgtactaccgaactggtgcagagtatcggttcgatcaaggccgcgatgttcgccgaactgccgccgggctccaagctggtgcgccaccgcgacccgtatgccggctcgtatcgctatcacctgggcctggacacgccgaacgacccgggctgctacatcaacgtggacggcgagaactactactggcgtgatggcgagccggtgatgtttgacgagacctacatccacttcgccgaaaacaccacgcagcagaaccgcatcattctgttctgcgatatcgagcgcccgatgaaataccgttgggccgcggcgttcaatcgctggttcagccgcaacgtgatggcggccgcgggctcgcccaacgatgccggcgacaagaccggcggcctcaaccgcgccttcacccggctgtacaagattcgcttgcgcggtaaagagctgaaaaagcgcaaccgtacgcgttactacctggaaaaatgggcgatcttcgcaaccctggcggcgatcttcctgctcatctgagtgtttcgggcgccattcactccagtggatgagcgcccagtttgtcccacatcttcttgctgattttctgtcgattggcatagccgtcccagggatcgcccttcaagccatccaggcgctgctgcaggttggcgaccgtccattgctgtgcactgcgcaaccccttcaattcctcacgactgaccggcaccgacaccggcaaacccgggcgtgcccgcacagagtaggcggccacggtgctggcgccccgcgcattacgcaggtagtcgatgaagatcttgccgacccggtttttcggtcctgacgtcgcggtgaagcgttcaggcagttgctcggtcatgaattgggcaatcgctttggcgaacgccttgacggtgtcccagttgtctcggcgcgccagcggcacgaccaggtgcaggcctttgccaccactggttttgacgaaggcttgcaagcccagctcgtccaagaccgagagggtgagctgcgccgcttccagcatggttttccagggcagcgccggatcagggtcgaggtcgagtacaaataggtccggggtttcgatcttgtcggcggtggcgccccaggtatgaaactccacggtgcccatctgcaccgccccgagcaacgctttggcactgtcgacttccatcaggcgcgcgtggccagggtcgagcgcctgatccagctgcttgatgttgggaatggccaggcgctccgaatgtttctggaagaactgctctccctcgatgccttcaggcgccctcagcagtgacacgggacggtggcgcaggaacggcaggagccactcgctgatgccgttgtagaactgcgccagttgctctttctgtgtgccgctctgctggtcgatcacgcggtctgggtgggtgatttttacgctgccggtgttttttttggcaggcttcatggatttgctcgtgcgcggttgctcatgaatgatctgcgcggccggcttgtcgctgcgcattgcgacgaacgccgcctggcgcaccacgcctccacgggtccattcggcaaactgcacttcaccgaccaaggtcggctccacccagtgcacgccacgggcctgggcactggtcagcggtttccccagcggcgatgacgtgcgctccaatggcgtgagttgcgcatggatcgccttcagtgatgcttgatcaaatccggtgcccacgcgtccggcatacaccaatcccgacgcttcattgaccgccagcaacagcgcaccgaaaccactgcgcgaaccctgcggccgggtgtagccgacgatcacgaattcctggcgcaggcggcatttgagcttgatccaatcggcgttgcgactggacacataagggctgcccaggcgcttgccgatcacgccctcaagggccaggtcacaggcgctttcaaaaatgtcccggtgatgggcggtaaaggcttcggagaatcgtaatagcttgcttctgctgccagccaacgcagtctttagcgccgcacgccgatcctcgacgggggcctcgcgctgatcctggccatccaggaatggcgcatcgaacaggtagtagacaatgtccaggctgcgcccgatatcgaaggcgttttgcagcgcctggaagtccggcaggccgtcgccgttcaggctgactacttcgccgtcgagccagctgtcgttgagcttcaaagcttgcaaggccttggtctggcgcggcaggcggtcggtccagtcgtggccgttgcgcgtgaacagccgcacctcgccgtcgcggatgcgcgcgagcatgcggtaaccgtcgaacttgatttcgtactgccaatcgccctcgggcgcgcgatccaccagggtggccaattgcggggtgaaatgctcgggaagggtcgccttggtttttcggggttttgcgcgaggcttgggtttacccaccgaggcggcgctgagcacgctgtccggctgggcctggacaatatcgtagtcttcggcggggcgtgcctgcgcgtcctgttccttgatcagcagccattgctccttatcgccgctgcccttcaggcgtgtgcgtaccaatgcccaatcgcccgaaagtttttcgccgaccagggtgaacttgagcttgccggcggcgtaggctttgcgcggatcgtcatggggttgccacacgccacggtcccacacaatgacctcacccgcgccgtactggcctgccgggatattgccttcgaagctgccgtagtcgagggggtgagcttcgacatgcacagccaggcgcttctgtgcagggtccaggctcgggcctttgggcactgcccaactgagcagcacaccatccagctccaggcgaaagtcatagtgcaggttgcgcgcggcatgtttctggatcacgaaggacagcgccgacgccttgcgtttacctgcgggcgcactgcctgccggttcacccgtaatgccgaaatcgcgcttgcggttgtattcgctgaggggcttgggcatgacttatgaggccttggtggatttcttcgcggcgggcttcttggcgggtttgccggccaggctgcgcttgagcagttccgtcaggtcgatcacgtcggcggacttgcgctcttcactgtcttggcgggtttccacatcttcgatcttgccggccttggccttcttggccaccagcgccatgattttttcctggaagctgtcgcggtaatcatcgggttgccagtcggcgctcatgtcgtcgaccaggcgcttggccatgtccagctcacccttggccagggtaggtttagtcacgtcgctgcccagttccagttcgtccaggctgcgcacttcggccggccagcgcagcatcaccaataccagcgccgactccaatggcatgagtgccgccaggtgctgcttggtgtgcaggaccacgttggccagcgcgacttttttggtcttgctcagcgtttcccgcagcagcgcgtagaccttgccaccgcgcttgtccggtgccaggaagtagggcgtgtcgatattctgcagcgggatctggtcactggcgacaaacgcgatgatctcaatggtctgggtcgacttggggtgggccgaacggatttcctcttcgctgagcaccacgtagcggcctttcttgaaggcgacacccttgacgatattgtctttagtgacttccttgccggtggtcttgttgatgcgcttgtagccgacccggtccatgctgcgcttgtccagccagtcgaagtcaacgccctgcgatgacgtggccgagaccagcgacaccgggatatgcaccaggccaaagctgatggcgcctttccagatggctcgtggcatagctgcgattccttgagtagaggctgtgtgcggatgactcggcgccggtgtggaaagtttccccaggcggatgcgcggacagatcgtgttacacctgatgagaaagtatttagtgtcgaaaggcgaaccctgggcgtagcgtgttatcgaaagcacgtactcctcactcccgagaggctttgtcaatgaacacttgtatgcgtcacgttgcagcgctgctgttgggcctggccctggttcccgtggtccaggcgcaaaacctgcccggcagcaacaacgccaacaacggcccgatccaccgggccaaccccaacagcatgcagggcacccagcccaacgcgccggccattcgcgggattcagaccgggccgaccacccgcacgccgaccctggaaaacggcggcattggcaacagctatcccaagcgcgacgccgcccccagccgcccggccaccgaaaccaaagcccccacttatgatgccaacggcaatcgccggtaaggattccgtcttatgtttctacgcaaaaccctgctagccgcgctgtgcgcaacctcgctgttgccgttgacggccacttttgcaactgatgcccagcagttccccagcgaacaaggcagtctctccgtcacgccgatcgccaaaggcctggaccacccctgggccgtggcctttctgccggataaacaaggtttcctggtcaccgagcggcctggtcacctgcgctttgtcagccccgacggcaaactttccgcgcccctgaccggcgtgcctgaagtgtgggccaaagggcagggcggtttactcgacgtggtgctgtcgccggacttcaagcaggaccgcatggtctacctttcctacgccgaaggtggtggcaaaggcggaaccgccggtactgcggtagggcgtggacgtctggcggctgacctgagtggcttgactgactttaaagtgatcttgcgccaggagccgaagctgtccaccggcaaccactttggttcacgcctggcgttcgaccgcgacggttatctgttcgtgactctgggcgaaaacaacgaccgcccgactgcccaggacctggacaaattgcagggcaaggtggtgcgcatctaccccgacggccgcgtgccggatgacaaccccttcgtcggccagcccggcgtgcgcccggagatctggtcctacggccagcgcaacccccagggtctggcgttgaacccctggagtggcacgatctgggagaacgaacatgggccacgcgggggtgatgagatcaatatcatcgagcgcggcaagaattacggctggccgttggcgacccacggcatcaattactccatggcaccgattcccgaagccaaaggcaagaccgcagaaggcaccgtgccgccccatcatgtgtgggaaaaatcaccgggtatcagcggcatggcattctacgatgcagaccgcttcaaatcttggcagcacaacgtgttcatcggcgcgctggccagccaggagctgatccgcttgcagttcgacggtgacaaggtgattcacgaggagcgtttgctgggcggtttgaaagcgcggattcgcgatgtacggcaggggccggatggctttttgtatgtgctgacggatgaggataatggcgtgctataccgagtcggcctcaatcaggactgaagccgacgacaacctgtaggcgcccggcttgccggcgatggcgatttgagcaacgccatcgccggcaaggtttacaggcccaggtcagacagccccggatgatcatccgggcgccgtcccagcggccagtggaatttgcgctcgctttccttgatcggcatgtcgttgatgcaggcaaaacgattggccatcaggccgttctcgtcgaattcccagttctcgtttccataggaacggaaccagttgcccgaatcgtcgtgccactcataggcataccgcacggcaatgcgattgtcggtaaacgcccacagctccttgatcagccgataatccagctccttggcccatttacgggtcaggaaacccttggcctcttcgcggttatgggcgaactcggcgcggttacgccactgcgtgtcgagggtgtaggccagggacactcgatgtgggtcgcgggagttccagccgtcttcggccaaacgcactttttcgatggccgatgcgcgggtaaacggcggcaggggcggacgtgtttctgcagtcgatgacatggggcagttcctcaaacaatcagggtgggttgaaagttgcgccgttgtgcgatcaaagtcccaacaaggtttgcgccatgcattgcgcattatcggcagctgttgaatcgcccatcaccagggcaacggtaatggcgccatcgaccaggatcagcaggtgcgcggcctgccgttcagggtcgggggtgccatgtgcttgacacagttcgagcaggtactcgaacagtttctgtttgtgggccttggccaactggcgcaccgggtcctgcgggtcgccggtttcgccgctggtgttgatgaaggcacagccacggaaatcggcggagccaaaccaggttttcagtgcatcgaacaccgccagcaggcgctcgccggtgccttcgctgcgttccacctctgtgcgcagccacagcatccagcgctcgtcgcgccgctgcagggcggcaatcaccaaatcgtctttattggcgaagtagcggtagatgctttttcgcgagacgccggcggttttcaccaggaagtccatgccggtggcggcgatgccgtggcgatagatcaacttttcggtgacgtcgaggatgatgtcgcgggtttcattatgggtcatgtcgttcatgttgcgaacagtagaacgatcgttcttcttggtcaattaaaatttttccatgcgccacggcaagacctgaggccccccatggtgtaagctcggggcctcttcggattcgacccattgcgagccttatgccgtcgttcttcaaacgctccctgttgcccaaactgcgcggttttcccctcactcctgatgcgattgacgtgctgtgcggcgccgctgcctatcgccgctgcctgctggagaaaatcccccaggccacccggcgcatctacatcgtcgcgctgtacttgcagcaggacgaggcggggcaggagatctacgacgccctgcacgccgccaaggcagcgcgaccggagttggacatcgtggtggtggtcgactggctgcgcgcccagcgtggcttgatcggcgccggcaagcagccgggcaacagtgcctggtaccaggccatgacccagggccacagcagtgaagtgccggtgtatggcgtgccggtgcaaacccgcgagttgttcggcgtgctgcacctcaagggctttgtgatcgacgatacggtgctgtacagcggcgcgagcctgaacaacgtgtacctgcacaagttcgacaaataccgctacgaccgctaccacctgatccacagccaaccgctcgccgactccatgcagcatctggtggagcacggcctggtggcctccaaggcggtgcatcgcctcgacctgcccaacccgcccagcacccgcagcctgcgcaacgacattggcgacctgcgcagccgtctcaagcacgcgacatacgacaccaccaccgggcaattgcccaacggccatctgtcggtcagcccgctgctgggcgtgggcaagaacaatccgttgagccgggtgatcctggagctgatcgccagcgcccagcatcaactgaccatctgcactccgtacttcaacctgccgctgccagtgacccgcgaaatcaaccgcgccctggcgcgtggggtaaagatcgacatcattgtcggcgacaagaccgccaacgacttctacatcccgcccagcgaaccgttcaaggtgatcgccgcgctgccgtacctgtacgagatcagcctgcgccgtttcgccaagcgccatcagcgcgacatcgaccacggccagttgaacctgcacctgtggcaccacgacgacaacacctaccacctcaagggcatgtgggtcgaccagcgctacaccttgctcaccggcaacaacctcaacccgcgcgcgttccgcctcgacctggaaaacgccttgctgatcgatgatcccaagagcgagtggctggagccaaggcgtaccgagctggcacagattttccagcacaccacgcgtatcgaacggtatcaggacttgcagacgctgcctgattatcccgaggcggtcggcaagttcctgcgccgggtcagccgggtacgaatcgagcggttgttgtatcggatcctgtaaaacccgcaggcaaaaaaagacccagccccttcaacagggctgggtctttttttgtgctgcttagttcaggcccagcttaccccgcaaggtggacaggtcttccgccagggtattgaccggacccaccagggccttgcggtcgttttccttgaccttgtcataggtttcgaaaccgccatccttggtcttgtacttggcgaggatcttgtccacgctggcgaaattcttgtcgaccttggccaggaaggccttgtcttgcttctcgatctgcccacggaacaggtcgacgattttcttcgcgccgtcgatgttgccctggaagtcatacaggtcggtgtggctgtagcggtcttcttcgccggagatcttggtggcggcgacttcttccagcagcgctgcggcaccgcctacgactttctcgggcgggaaggtcaggccgtcgacgcgggtcttgaggtcgttgacgtcggtgttgagcttggcggtcagcgcttccaggcccttggtggtgttctgcgagaacagcgcgtattcgatacggtggaagccggtgaagtcttcggcggtcacgcctttttcgtggtcgtcgacacgggagtcgatggacgcatcgaggtcgctgaacagctcggcgatgggctcgatggactcatagtgcacgcgggtcggcgcatagagcttcttggcggtggccaggtcgcccttgttgatggcgtcggtgaacgcctgggtctgggtgaccagctcaccgatttcctcggtgacgtagatcttgtagtccgacaccggccctaccaggtccagcggcgcggtggcggcgaaggctgccagcggcgaaagggtcagcaacaacgacaacgcaatagtcgacttcttcatgggacggtatccgctctgagtgtgtttttaggtattggcagtggtttgagggtgcgttgcagcaagcagcgtgcgcccgatgaaatcctgggccccggtgacgcctggcaaggtgaagaaatacccgccgccgaccggcttgaggtattcctccagcggctcgccgttgagccgggtttgcacgctgataaagcctttctccaggtcagcctggtagcagatgaacaacagccccatgtccagctgaccgttcttgttgacgccgttggagtagttgaacggccgacgcaggatcaggttggcctgggtctgcggggtgcgcgggttggccaggcggatgtgggcatcgagcttggtcagtttgccttccgggtccttgctgtagtcgggcacttgggtttcgttgtggccatccatgggcgcaccggtgggcttgacccggccgatgatgctttcctgctcctgcaacggagtgcggtcccagcgttcgacgaagttgcggatgatgcgcacggcctgatagctgccgttggcggcccaggccggttcgtcgctgccgggctgcacccacacaatctgattcatggccttggcgtcgttggagttcgggttggccgaaccgtcacggaagccgaggaagttacgcgcgctctgggccggctcgccgggcttggcaggcgcctggggcggtacgctgccttcctgcttccagcgcaccagcagcaggtcgggcaggtttttcacgatgtcgcgcaaggcgtggatattggtgtccggggtgttggagctgaattgcaggctcaggtcgccgtggcattgcgccggctccagcgcatcgttggggaacccgaccatgcggctcaggcgcttgggtttgactgccgtgaggccaaagcgctcatcgaacagcgattcgccgacggacacggtgatggtgaggttgtccggggtgaccaccgggccgaggatgccggagtcggtgggcggcagtttcgggtcgacctgcggcacggtgccgccggtcatgagaaaggcgatgcgttcgttcagcgtacggaacaggcgctccaggtcgtcacggtcgctggctagtacgtcgaacgcaacaatcatgccgcaggccgggcgtggggtgacgataccgctctggtgtttgccgaagaaatcgtggtggtcctgggtcttgtcactgcgcggcgcggtggtgacttgctcggccgcagcggccatggccgggcaggtcagggcgctgccggcaatcgcggcaccggtggcggccatgcccagcaggacacggcgacgctgaaggttggtgtgttctgaatcactcatgtgtgcggtcgtcttcactgcaggccggaaaggccaagggcggggtcgattccatcgagtgcaacggccagagccttggccttgccggcgatctgcttacgctgatcggcggttacggtgtcgtaggtggcgtagcccttgtcgaccttgaagccttgcagttcggcatcaaaggcggcgagggcgctgtcgattccaggcaacaggtcggcggcggatttggtcagcagcgggcgcatcaactcgaccaccttgtgggcggcctccaggttggcggcgaaaccattcaggtcgacgtggctgtagcgttcttcttcaccgctgatggcgcgtacatcggccaggctgttgaggttgcgcaccacgatgctgaccaactgctccggcggcagggactgggccagcaattgttgtttgagggcgctgacgtcggtcagcaggcgctgggcaaccggcgccagcccgtcaaggctgcgttgctggaacagactgtattccaggcggtggaagccgctgaaggccgggtcctgttcgcgtttttcaaaatagtcggcacgggcgttgatcgcgttgtccagttgcgcgaggcgttgcgatgccggggccaggcgttggtaagcctcccgggccggtacgtagagcgcttgggcctgggccaggtcgccatggtcgatggcctgttgcaacgcgctgaccgccttgaccagtgcgctgccttggccgctcaagtacacgcggaattccgacaatgggccaatgaacgccaccatcgacggtttggccttggcctgggcgtcggactcggcagtcggtgttacgtgcaaggtgccacgcgggttgctcagcaggccacaggtgatcgcgtagtcaccgggcaacaggttggcgttgatcacctggctaagcccgggggcgatgttttcccgttcttcgaccaccagcacgccgtccaggatctcccattccaccgcacgatcggagcggttgatgatgcggaagctggcgcggccggcggggaccgtcaattcattcggttcgcaggcgtgaccatgaatgatcacggcgatttcattttggttggcctggcgcttgctggcggccagctgtgaggcgtaatagaacaggccaccggcggcgatcatcacgaccaccgagcccgccacagcccagcgcagggcgcgaggtggcgaaggcggttgaggggttgggttggacaagagacggtccttactgactggaagcggaagagggtgtgatggcctgcttgggtggcgcggcgggcaggaagaacatcaccagcgccaccaccaggtaaatcaggtaggcgccgagggtgctgacggtgggcgcttcctgatagccgaacatgccggcgagaaccgaacccagcgggctgtccatgggcagggcggcgctgaagtcgaagagcacggtttgcaggtgattccacacgcccgcttcgtgcagggcctgtaccgaattggcgaggatgccggcggccaccaccaggatgaacaagccggtccagcggaaaaacgcaccgaggttcaggcgcatgctgccggtgtagatcaggaaaccgacgatgatcgccaggatcaggccgagcagggcgccaatcggtgcgccggggccttcgctctgctggaacaccgccagcaggaaaaacacggtttccaggccttcacgggccacggcgaaaaacaccatgaggatcagcgcagtgacttggtgtttggacccggccaacgcgtgatcgagggattcgtgcagggagtgcttgatggaacgcgccactttacgcatccagaacaccatggaactgaggatgcccacggcgaccaggccaacgatgccttcgaacagctcctgctgcttttgcgggaactcggcgctgaccagctccagcccaccacctaccagcagggccagtgcggcggcgagaaacacgccgatccacaccgcaggcatccactggccacggccggtctgttgcaggtaactggcgataatgccgacgatcaatgcggcttcaatgccttcgcgcagcatgatgagaaaaggaacgagcattcggcaccgcgtcacaactagataggaggctaagttgtaacataatgatactcattactaaacaggcaatcttgacaatagctgaaccctacctgaacggtggtggcaaaacgcatcccaccttatgatgcgtgccattatttgcgccgccggatgcccgtttcgccatgtcggaaaaagacaccatctccctccacctcgtgcgcgaagccttgctgcaaagctgcgcgcccggcgcggccagtgccgaagtgctgcataaagccgggattgacccggcactgctggccgagcccaacgcgcgggtctcggccactacctacgcacgcctgtggcgcctgctggcgcgacgcatggatgatgagttcttcggcatggacccgcgcaagctcaagtccggcagcctggcgtttctctgccgcgccgcgatggcgcaacccaccctgggcaccgggctggaaaccggcttggggtttctgtcgctgatgctggagcgcctgcccgccgagttggtgcgtcaacaaagcctggcggagatcgtattgctggagctcgagtccgaacccaatcgggccttcacatactttacctattggatgatcgtgcacggtgtggcctgttggctggccgggcggcggatcccaatcctggcgattgagctgcgctgctcaaaaccggatttctgtgatgactaccaggtgatgttctccgacaacctgcgtttcaaccggccccgcacccgcatgatcttctccgccgactgcctggacctgccgatcaagcgcagcccggaggagctcaagcgcttcctggcccacgcgccggccaacatcctggtcaaataccgcgaccccgccagcctcgccacccgcatcaagcacgacctgcgccagatgcctcctgacacctggccggaaactgacggcctcgccgccagcctgtgcatttccgcctcgaccctgcgtcggcggctggcggaagaagggcagacctatcaggggctcaaggacagtgtgcgcaaggagttggcgattgtgtggttggcggagccgcagatcagctttgccgaaattgccgagcgactgggctttgccgatgcaagttcgttttataaggcgtttcgtaaatgggtggggtcgaacccggggcattatcgaagtttgattctgaatgaaacaaacaagcggtaacggtgtggatgtgcgggattaggaaataacttacccgcttcttctttcggatgacagaacggtccttcgctattttaggaagtgctcggcttgccgccatttcttcttcgtgcatagttatcctcacggtacctgaatacgcctattggacgattcgattaatgtgctgcgcttacccgcgacggcgggtgtgcgctgctgaatcgagggcagcctatgcgcaaataaaaacagaacgattacatgaacaccaacaatcttaatggcttgaggtggaaatcatgaaaagtagttttgcgttggtttttgcgggattgatgttgatgtcggcgcaggcgtcggcgttgtgtacctatattacggagagctacggcggcactattccgccgaaaacggcgatacctgccaaagggccttttgagaacacctccgttaatggctgtttgaacgccagtattgatgccatcgtaacagccaccggtgcagggaacaccccggagatctatatcgaaggcgaggtgggaggtggatcatggcgacggttgacgttcagtatcggcagcaacgcttcttgggtaggtccgttcggtaagtacagggtggtggtgtataacgacgactcggtaccaaaagtctactcgggaagtgtcaggtacggtcgttgaaaccgaacctatgcagtgtgccggaagttatccggcacacggccttctgtgaggtaaattcagaaatcatgcacgctcgtcaattgataaatcgtcatttgacgagtttgcgaaataggccaatgcggcgagcgcgtgattcgctgccaccagtcctctcataaaatctgaagcaccctcctgatgtgctacatatggattgcttttgaaaaagtctatatatccctccagctgctcgttaaataacgcgacggcattgaatttgacatgggtctctgcaggaagtccgtttgcatcaaacgctccgtttcctacgacgaacagccaataagcgcgggaatcaataatgcctttgtcgtagagttcgctacctacttttttcaggtcgttactgctgatcgacgtcatgtcgtggcccttcagaaaactcttcaattcactgatttgctcctgctgccaaaacttcagtgtctctgccgcttctgcttcttcagtcttagtgaatgcgttcacgacttgttcaggatttttgatggtgtaaccaggggttgccattgagttctgcacttgacctgtcgctgataaggtaaccataaaaagcctcaagtagttggggttacatctggttgtcgacaagttggtgagtttcttaagtgctgaaaatgtttcgtattggggtggcgttattgtcagtgttgagcggttgtgtgggattgtgcaggtgggcatggtattaggagtgtttgcatgtggactaccttcatgtctgacagaactgtctggcgatgttttagataagtcctgaaccgcctgacttgtctcaagggactacagaaaggtccttcgctattttaggaagtgctcggcttgccgctgtttatttttcatgcatagttatcctcacggtacctgaatacttctattggaagattcgatcaatgtgcttcgcttacccgcgacggcgggtgtgcgctgctgaatcgagggcagcctatgcgcaaataaaaatagaacgattacatgaacaccaacaatcttaatggcttgaggtggaaatcatgaaaattagttttgcattggtttttgcgggattgatgttgatgtcggcgcaggcgtcggcgttgtgtacctatattactgacagctatggcggtattatcccgccggaaacgaccgtcacagcaaaagggccatttgaaatcaccccttcgaacggctgcttgaatgccaacattgaggcgatggtaacgcccacaggagctggcaaaacgcccgagatctttattgaaggcgatgtgggtggcggatcatggcagcggttgacctacagtatcggcagtaacgcgttttgggtggggccgtttggcacctatagagtgcgggtatataacgacggtccagtaccgaaagtctattcaggcacggtcagatacggtcgctgaaaccgaagggatgcagcgtgccaagtgatcttcggcacactgcatccgtcaactctgaaatcagacgcgctcgtccaccgacaatttatcgtttgaagaattggcaaagtaggacagggcagcgagcgcatgattagcggttaccagccctttcataaaatccgatgccccttcctgacgcgctatgtagggattgcttttgaacaagtcaatatacccctccaacttttcgttgaataaggcaattgcattgaatttaacatgggtgtctgctgggaaaccgtacgcatcaactgctccgctcccttccacaaatagccaaaaagcacgtgaatcaatgagacctttacgataaagctggcttccgattttcttgaggtcgtcactgctgatcgatgtcatgtcatagtccttcagggcgttcttcaactcgctgatgtcctcctgctgcacaagttttaaagtttctgtagcctccgcttcttcggtgatggtgaattgattgacaacttgcccagggtttttgatggggtgggctggagtggccattgaattcggtacttggcttgtcgttggtaaagtgaccatgaacagtcctctgttaatcgggcctacatctggttgtcgacaagttggtgagtttcttaagtgctgaaattgttacgtttgaggttggcgttatcgccagatttaggcggtggcgtgggcttctgccggcagggcgtgatattaggaattttcacgcgttggactacttcgagatctgacagaacggtctttcatgtttttgggaagtggccggctttcctcttgcgatcattcaggcatagttaatagcacgcagcctactgaagggttcgatctatgtgcagcatgtcaccgtgacgaccggtgcgtactgccaaatcgagggcgatatatgaaaaaacaaaaagattgctgatgagtgttcgcaaaaacttaataggattaacacttgaggtgaaaatcatgaaaagttttctcgcattaccttatttagtgctgatgttgatgtctgctcaggcgtcggctttgtgtttgactcttacggatagctacagcggaataattcagcctgactccagggcggtagcactgggtccgttcaccatctcgggagctaacggctgctcgaacgcaaatatcgacgcaatggtatctgcagcaggcggaggtagaccgcctcagatatacatcgagcagcaggtgggaggggcttggaaaaccgtggccggtaaccctttgtcagcctacgcctcatggctcgggtcattggggacctatcgggtgatattggataaccccgaagcggtctccaagtcgtattggggaacggtcagatttggccggtaatgccctgatagaaccgggtgccaagggttcggttggcacccggtgtcgaaagaacccgcttcaagcacgttcctctatagaaagatcacttcgggaggagttaacaaaaaacgccagcgcattgatagcgtgattggcggcaaacatcccttgaatgtattcagggatgccttgcgagcgctgcacgtcaggacgcccctcaacaaatgacaggtaatcctcaaggacttcatcgaacaaagcgattgcgttgtactttacatcggtttcagcgggctggccgttttcatcaaaggcgccgaggcctgttatgaacatacgaaagccctggccatcaatgacgccactttcataaagccgccttccaacgacttttagctcattggtggtaatagacgtcatatcgtaatctttcaaaaacgctttcagatcatcaatcgactgttgattacccagtttcaacgtgtccgacgctttcgacgcgtctgttatcgtgaatttattcaccacctgttccgggtgctttatctgaaacggattagacgccttcgtgtgcctcatttgctccgcagtcaacaaaacggccatagtgaaattctccatcagccgaaagctacatctttgtatcgaccttccttgaacccactttaaaaaaagccccgtgaccgaatggaccacggggcaaaaaattggctggatgcgaccaaccaaaggagctctttacctcacttggcgctggcgaccaccgtgtccggctgccagccaccgcccaacgctttgtagatcgcgacgatgccgcgatacaggtccacttcggcctgggcctgggagtcttcggcggccaggcgctcacgttgcgcgtccagcagcaccaggaagtccacggtgccttcgcggtagcggatcgcggccaggtcggcggcggcacggctggattcgctttggcggatcagcgaaaccaggcgttgctgacgcttgccgtagtcactgaaggcgttctcggactcttccaacgccagcagcacttgctgctcgtaggtcgccagggcgccatccgcttcggcatcggcgccgcgcaaacgggcgcgcacgctgcccaggtcgaaggcggcccaggtgatgctcgggccgagggcccaggcattcgcggcggacgagccgatctgggaaccgcgcccggcggtaaagccgaggaagccgctgaggctgacccgtgggaacaggtcggccttggccacgccgatacgcgcagtggcggcggccagtttgcgttcggcgctgaggatgtccgggcgacgttgcagcagttgcccggggtcgccaatcggcaaggccttggcaattgccggcaagtctttggggctcaggtcgacgctgagcttgtcggggcgctggccgaggagggtagcgatacggttacgctcgcgcacttgttcggcttgcagttgcggcacgctggcttcaaccgctgcgaggcgtgcgtcggcacgctccacgtcgagttgatcgcccacaccggcatcgcgcaggctgacggtgatggtgcgcgattcctgctggttcttcaggttgtccagggcgatgcgttcacgcagttgcgcgccacgcaattggccgtaggcgtccaccagttcggcgatcattgtcacttgcagctggtacaagtccgcctcggcagcctgctggtcagcgtcggtggcttccagattgcgctggatgcgaccgaacaggtccagttcccaggccatgtccaggcctaggtcgtaacgctcggtcttgacccggctggtggtctggcccggaatctggcctttgccctgatcactgctgactcggctggtgatggtcggcatcgcgtcgttgctggcgtcatcacggatcgcccgcgccgcccgcaggcgggcaaaggcgacgcgcaggtcacggttgccttgcagcgattgcgtcaccaactggttgagggtcgggtcgtcgaactgctgccaccagatgccttcgaacttggcatggtcatattgcttggcatcggcagcggccgtgatgttggccgcctccggggtctgggtcttgtagtcggggcctacggcacaggcgctcagcgccagtaccagcaagctcggcaggaatactttcacactcattgctgtgtctccagcttcaaggccttggccgctttgcgtgcctcgctgcgctccaccgagcgacggatcagtacgtagaacactggcgtcagcaacagaccgaagaaggtcacaccgatcatcccggagaacaccgccacgcccatggcatgccgcatctcggcaccggcgccgctggacaacaccagtggcactacacccatgatgaaggcgaacgaagtcatcaggatcggccgcagacgcagacggcaggcttccagcaccgcagcgagcgggtcgaggccttctgcctgtttgtccttggcgaactcgacgatgaggatcgcgttcttgcacgccaggcccaccagtacgatcaagccgatctgggtgaagatgttgttgtcaccgcccgagataatcaccccggtaatcgccgacagcagggtcatcggtacgatcaggatcaccgccaacggcaggctccagctttcgtattgggcggccagtaccaggaacgccagcagtacgcagagcgggaacacgaacagcgcagtgttgcccgagaggatttgctgatacgtcaggtcggtccactcgtaggtcatgccgttgggcagttcgtctttcagcagtttctcgatcgccgcctgagcctggcccgagctgtagcccggagcagcgttgccgttgatttcagcagtgataaagccgttgtagtgcatcacgcggtccgggcccgaggtgtcgctgaccttgatgaaggtcgccagcgggatcatctcgcctttgttgttgcgcactttcagctgaccgatctggtcttcatccaggcggaactgttgctcggcctgcacgttgacctggtaggtccggccaaagcggttgaagtcgttggcatacaacgaacccaggtagatctgcagggtatcgaagatgtcgctgatcgccacgccgtgggtcttggccttttcacggtcgatggcggcatcgacctggggcacgttgaccgtgtagctggtgaacaggccgaacagttccggcgtggtacggctcttggtgatgatgttctgcacttctttgtacagctcgtcgtaccccaggttgccccggtcttcgatctgcaggcggaagccgccgatcgtacccaggccctgtaccggcggcggtgggaagatcgccatgtaggcttcctggatgctgctgtacttgccgttcaaggcaccggcaatcgcgccggcggacatgctcgggtctttacgctcgtcgaacggtttcaaggtcacgaacacgatgccgctgttcgggctgttggtgaaaccgttgatcgacaggcccgggaacgccacggcggcttccacacctggttgtttcagggcgatgtcggacatgcgcttgatcacgtcttcggtgcggtccaggctcgccgcgtccggcaattgagcgaaggctaccaggtattgcttgtcctgggccggtacgaaaccggtcggcgtgtgggcaaagcccagccaggtcaggaccatcaggccggcgtacaggaacagcgcaataccactgccacggatcacccggcgcacggtgccgacgtaaccatggctggccttgtcgaagaagcggttgaacggtttgaacaaccagccacccagcagcttgtcgaggaacttggagaagccatccttcggcgcgttgtggcttttgagcagcaccgccgccagggcaggggacaaggttagggagttgaaggccgaaatcaccgtcgagatcgcaatggtcaaggcgaactgcttgtagaactgcccggtcaagccgctgatgaacgcagctggcacgaacaccgcacacagcaccaacgcggtggcgatgatcgggccggtcacttcgctcatggctttttcagtggccgggaaggggtccaggcccagctcgatgttccgttcgacgttttccaccaccacgatggcgtcatccaccacgataccgatggccaataccaggccgaacaacgacagcgcgttgagcgagaaaccgaacaggtgcattaccgcaaacgtaccgatcaacgataccggcaccgccaccaacggaatgatcgaggcgcgccaggtctgcaggaacaggatcaccaccagcacaaccaggatcagcgcttcgaacagggtgtgtaccaccgcttcgatggagccgcgcacgaagatggtcgggtcatagacgatgctgtagtccatgccttgcgggaagctctttttcagctcttccatcttgccgcgcacttcgttggagatctcgatggcgttggagccagggcgctggaagatcgggatggccacggccggctggttgttgagcaacgagcgcagggcgtattggctggaacccagctccacccgagcgatgtctttcaaacgcgtgatttcaccgttggcgccggagcgaatgatgatgttctcgaactcttcctcggtcaccaggcgaccctgggtgttcaccgacaactggaacgcggtggcggtcggggcgggttgcgcacccagtgcaccggcggccacttgacggttctgctcgcggatcgcggtcaccacatcagtggcggtcaggttgcgcgaagcggttttgttcgggtccagccatacgcgcagggagtagtcgcccatgccgaacagctgcacatcacccacaccgccgaggcgcgccaactcatccttcacgttgagcaaggcgtagttggacaggtagagcatgtcgtagcgctgatccggggaggtcaagtgcaccaccatggtcaggtcgggggaggccttgtccacggtaataccgatgcgcgtcacttcttcaggcagtttcggctgagtccgggtcacacggttttgcacttgcacctgcgcgttgtccaggtcggtgcccagggcgaaggtgatggtcagggtcagcttgccgtcggcggtcgactgcgaggacatgtacagcatgttctcgacgccggtgatcgcctgctccagaggagcggccacggtttcaccgatgaccttggggttggcgcccgggaagttggcgcgcaccaccacggtcggcggcaccacttccgggtattcactgatcggcaattggaacagcgagatcgcaccggcgatcaggatcagcagcgagagcaccgctgcgaagatcggccgcgaaatgaagaacttggaaaaattcatcttgagtcgtttcccttaaccgcgtggagccgcgacggctgcgagcttgggcgcggttttttccggcgccacttgctccaggttgctggcttcaagcgcttgtcgttgttgggccaaggcggcgagggtttccttgctggccatcggaatggtttccggggcgaccggcgaccctgggcgcacgcgctgcaggcccttgacgataatggtgtcgtccttgttcaggccgctgcgcacgatgcgcaaaccttcgatcttcggccccagttccaccgagcggtaggccggcttgtcgccttccatcaccagcacgaacttcttgcccaggtcggtgccgacggcttcgtcgttgatcagcacggcagagtaggtgccgctgccgaccagcttcagccgggcgtacaggccaggggtgtattcgcccttgctgttatcgaacacggcgcggccacggatggtgccggtggccgggttgacctggttgtcgacaaagttcatctggcccaggtgcgggttgccggtctcgttggacaggcccaggtaaaccggggtggtcgcaccacgacggccttggcgggccagttcggtgtacttgaggaacacgcgctcatcggcgtcgaagtaggcgtagaccttgtcggtggacaccacgctggtcagtgcggtgacatcggcggtgaccaggttgccggcggtgatttcggcacggctgacgcggccgctgatcggcgacgtcacgcgggtgaagctcaggttcagcttggccaggtccaactgcgcctggatcccggcgacggcggcgcgggcttcctgggcggcggtggtgcgcgagtcggccagttcggcggagatcgcattgctctggcgcaggcgttcgccacgttgcgcttcattatcgctgcgggtcgcggcggcacgggtttgttgcagttgggcttcaaggcgacgcacttcggcctggaacggacgcgggtcgatctggaacagcaggtcgcctttctttaccaaggcaccttcggtgaaggccacttggtcgatctggccggacacgcgaggacggatctgcacggtttccggggcttccaggcgaccggtgaattcatcccactcgttgaccggttgttccagcaccttggccacgctgactttggcagctggcatggcggccgcttgttccggggttttgccgcacgcgctcaacaccactaccgccaaaatggccaaggggaagcgcaaatgtttgagtgactgttccatgaggtgcatccgccaatgtatttgagatgggcggatcatgcgcggcgctgtgctatgtcacgaatcgaatgaagcaaaggtaactatcattcggaatgatataagcgcgagattagccctctagcatgggggtttcgttagtgggctatcaataggcgtgatgacaattgtcttttgcaggccgtgcaactcaccggcgtagcgttttgagtgcgtccaactgtgttgatcaagcggattgcggcccaattgtcgagccatgatgcgcaggtggtctcagggtggtattggacgctggagggcagggtgcttgtgatgcagtgtgcgaccacggcagaattcagcggctgcgccatcgcaagaccgcgcattcaatgttgttgcaatctgaccaggaagtcgttgatgaccacgttccagaaccatgactgtcataccgttgcaacgctcggcggcgagttggcagcctttctttccaagaccctcggtgacatttgcgaacggatgacccggactcgcgcacagatcagtgagatcgatgctctggaactgcgtgatggtgacgcagaacgagatgcggcgttgttgaagacccggttgcgcatggaggacagccagcgtcgttacaatgcgcacaaaaaagagggctacggactgggatgggtgctgagccccttcgataccggagaggccaatagccaattcaaaaacgccgtggccaggcatgcagcggtcacccgtgactatgatgagcccaacgccaaggtgcagcgtgacagcgatatagcttcacacaatcagttcgtcaccgataagcgcaaagaacaagctgagctgaaggtcaagctgcagaaactcactcacgttcatcaagaactgaatggttttctccacgaggcgaacgaagccttggctgccgcgtgcggtcaaggttggttggcagccgatttcgccatgcacctcgccgggatggacagggcgatacgtcaaggcaatgtgtcgctggctcgcgggcatctgacgcaattagtctttcagaaacgcccggatgacgccctctactcccgtttgcacaaccaggccctggagctgcgcaagcacgcctattccgcccattacggggtgcctgtcacgggctgtttcgccgatatcgttgacgcctccgtccagttggcagccgccaatctgacggcagattgtgcaagtcaattgctaggcgacctgcacagctcggatcaatggcaattgttgaccacgttggtcgcgtcgcctcaaaacctgcgcattgatgtgctgtggtccatctattgggggatgttccgctgccaacagaaaatggcggatgtgctcaaccgtacggtgtcaaccgaagaccccctgaatggccggttcagtcagtgtgttgaagatgggctttcggagtgggcgtccagccatattccgctattcggctatcctgtgtcccagtcttatctgggtatgttgcagttggccaatactgaagaagaaacccgtgtgggcgccgatatcggcgtgattatcgccctgaatattggtgggctggtctgtcgcaaagcagtgttgttgcaagccaagcgcgcaaaagactgggaggctgacgtaggcagcaagaagggccaattacccaagctttccaagttgccacgcggcgggtattacctgttctatcacgaatcgccccaactgcggttggactcgccggttccaacagtgagttcagcgcaggcgctgcagcagttgatactcgatgcaaacagaaacccgaatgcgaccaagcttaagctggatgttcgcagcacgggttgggactgggccagcttcatcagctttggtctgtgtgatgcagcctccggcattggagagccctttgacaccgttgatgacgccatgcggattctaggcagtggtgagaccggagagcttcctcggcacctgttactgctggcgattgaagacgagcccttcacgcttgaactgacgaagcgcttgcgtaatcaataccagcgggcggagccccaacaggacagatcaatgagcaaaacctcaaaaaaggactacggcagggagggcgctgacttcgagctgtgatggttcgagcaggccatggcgaaggggctgccaggtcgatcaccaaatctttaatcatagcggctgagcgtttcagcccgaacgtaggtgccaaacacgtgatcccataacggtgaagagacaccaaagttcttctcgataccttggcggtggtgcagctcatgattggccaccaggcctggaatgaagcgatacgcccaatgctcggggcgatgcatcacgtaatgtaccgagatgtaatagaagtacccgctcacggcgccaacaaatgtcgacgtcaatccggtgaaccaggccagcagcaacagcgcggcaaaggtcgagctagttttccagctcgacacaccgatataggccagcacgtcgacgtggtgggtccagtgctcacggcgatacagcgagtgaaacaggaagcggtgcgccgagtactccaccagtgaccaggccaacaggcctgcgagtgccagtcccggatcaaaaggtgcgaggtacagggcaaggaggatgaagagggggacggtgaagaagtcgaggtaataagcgactgacgacatcagccatttattggaagcagccatgcgcggaatatccctgtagtgcccgacggtcgggggcgcgattctcggggatcgcgccgtcgccgacaactgtttcgcgcggcactgcgacacaggtctcacgctgcgcttgcaatgacctgccggccagggatagccgcaatcaattcccgcgtgtactcactggccggccgatggaagatctgctccaccgagccctgttcaatcacccggccgttgcgcaacaccagcgcctcatgggcgaagttggccaccaccgacaagtcgtgggacaccagcacataggcaatgcccatctcccgttgcagctcttccagcagctcaaggatgcgcgcctgcaccgacacatcgagcgcgctgaccggctcgtcgagtaacaacaagtcaggttgcaacgccagcgccctggcgatggcgacgcgttggcactgaccgccagacaactctcgcggtaaacgatccaggtagctgaccggcaaatgcacgcggctgatcaactgccgcgccgcgtgctccagcgcggcgcccttgagccgcccgaaggacaccagcggttcgacgatgctgtcgaacacggtaaagcgtgggtccagggcggcaaacggattctgctgcaccagttgcaggcgttggcgcagcgggcggaagtcgcgccagctcaggtgggtgacgtcctgttgttcgaaccagacctggccctgggtcggtttttccaggccgagggcgatgcgcagcgcggtgctcttgcccgagccggactcaccgacgatggccagggtctggccgggatacacctgcaggctgagatcctcaagggccacgaacgttgattcttcacccttgaccctgggcattacaaacgtcttgccgacgtttttcaggctcaggatcggttgttgtgtcgaatccatgcgcggcaagggttcacgccgtctggcgaacgccggcgcggcggcaatcagcgcgcgggtgtagtcgtgttgcggcgcgccgaggatctggcctggcgcgccttgttcgaccacttcaccgtgttgcatcaccaggatccggtcggcgcggtcggcggccacgcccaggtcatgggtgatgatcagcagcgaaatcccgcgctcgctgaccaagcgttgcaagtggtcgaggatcttgcgctgcaccgttacatccagggcgctggtgggttcgtcggcgatgatcaagcgcgggttgcccgccagggcgatggcgatcagcacacgctggcgcatgccgccggagagttcatgggggtactggcgggcgcgcagtacaggcttgtcgatgcccacctgttgcagcagttcgacaatgtcggcatcgacgccggggtagcgtttgcccttggccaggatcagcgcctcggcgatctgctggcccacgcgcagggtcgggttgaggctgaccatcgggtcctggggcaccaggccgatggtgcggccgcgcaatgcacgcttttggcgctcactggcgtgggtcaggtcgtggccgtctacccacagctggccggcggtgacctgcgcactgtccggtaacagaccgaggatagcgttggccagggtcgatttaccggagccggactcaccgacaatcgccacggtctcgccctgggcgatgctcagtgacaggcgattgaccgccgtgttgccgtgccgatagctgacgctgagttggcgtacatccactaaagcgctcatcgctggatctcctcgaaggtgcgggcgatatggttgaggctgaacaccacggccaccaggaacaggccgggcagcagggaaacccagggagcggtgatcaggaagtgtcgcccgttggcgatcaaggtgccccattccgcagccggtggtgcggcgccgaaaccgaggaagctcagcccggcggtggccaggatcgcggcgccgaagtccagggtcgccagcacggccaccggcccccatgcattgggcaggatgtgccgcagcaaggtgcgcccccagctggcaccgcccaggcgcgcggcctcgacgtagggcagggtcttgacccgcagcacctcggcgcgggtggtgcgggcaaaccccggaataatgccaatgcccacggcaatcgccaccggcaccgtgccgaagccgatggccgtgacaatcgccagggccagcagcaggccgggcagggccagcagtacatcgacaaagcgcatgatcaccgcgtcgatgcgccccccggcaaaacccgacaggatgcccaggcccagcccgcccaagagggcgatgcccaccgcaagaaacgctgccaggaccgataggctggcgccatggaccacccgcgtatagaggtcgcggcccagctcatcggtaccaaaccagtggatcaggttgggcgcgcgcagcttgtcgacgggcgaggtggcgtaaggatcgaagctgctcaacacgtgcggcgccacagccgccaccaaggcaaacaccaccaccagcagcgccaggctgaaccccggtcggcgtaacagtggcaacactgtcgccgtcacgcgttgcaggcggctgcggcggcgccacagcgcagggctggccgggagggtattgcggcccaggttctgctcaagaacggtcatggtctaggacacctttggcgtgtgggagatgcgcgggtcgaaccacgggtacaacaggtcgaccagcaggttcaccaatacaaatgccgccgccgacaccgaaacgatggcgagcaccactggaatgtcctggcgcagcactgcttcttgggccagccggccaatgccggagcgggcaaagatggtttccaccaacaccgcgcccgacaccgtattgcccacctgcaagccgatcagggtgaggatcggcagcgcggcattcttgaagccatggcgtgcctgcacctggccacggctcaggcccttggcgtacgcagtggtgatataggactctgtccagaccccctggaaactgcgttgcagcacctgggcgtacaccgctgcactcggaatcgccaaggtcacggcgggcaacaccaggctttccaggccccggctgccggtggccgggaaccagccgaggccgaaggcaaacacctggatcagcagcagccccatccagaacaccggcaccgaaaaccccaatgacggcagccgtgccaaggctttcttcagcggttgccaacggatgtaggcggtcaggtaggccaggccgattccgccaagcagtgacaacacgatggccagccccgccagggacagggtctgcggcaggcgttcggcaagcagttcggccactgggcgattcagtgaaagcgactgcccgaaatccccccgtagcgctcccagcagcaggtcgaaatactgctcgaacaggcctttatccaggccgtagtaggcccgtgccttggccaggtcctccgcggacagcgcgtcggcctccatgcctgacgcgctgagcatgatcgacaaggtgtcgcccggcagcagatacagaatgaaatacgtgatgctgtacgccccccacagcaccagcagtgcctggccgatacggccgatcagataacggctcatggcgtgccgatctcaatatcacccagcagcgcaaaaccctcggcggtccagcggaagttttttaccttgggcgaggtcgccgcctgccacacacgctcatacaccgggaacgcggagctttcatcgataagtaaatcctgcaggctgccataggcggcagcgcgttgcggggcttgagtggccgtgatgccggcatcgaacaagcccttggcctgttccagcaccgccggttcataggtgttggtggccagcgtggaactgttggcgctgcgcggatcgaggatggtctgcaggatgatcgggtcggcgcgggtcatgtagttgatggtcaggtcatagttgcccgccgagttgttggcgacccattcggcgcgggtcactacgctgagtttcaactcgatgccgaccttgcgcagttggtcctggatcagcacatcgccggcggtctcggccggggtgatgttgtagctcaggctcaggcgcttgccgttcttctgccggtaaccgtccgcacccttggcccagccggcttgatccaacaaccgctcggcgtccgccgggtcataggccagcttggcgccctggcttttgaagtacggcgtggtcacatcgaagatgccgtccaccaccgggaactcggcgttgtacacggtgctggcgtagctcttgcggtccagggccttttgcagcgccaggcgtacttgccgatcggccaggatccgctcgccacgggtgttggggtacaggttcagcgccggtcccggcagcgagcggctttgaatggtcgcgcccttggactggaacagcttcaggtcgacttccgagaacgggttgcgcggccacaggatgtcggccttgccttgcaggaacaggccgttgcgcacgctttcttcggggatgtagctgatgtccaccgcgtccaggtgcgcttcaccctggtttttcatattggccgaggcccaggcgtagcccttgcgcttggtcaggtgcgcaccgacttccggcgtgtagctggccagtacgaacggcccggtgccgatgatcttgcccagggagcgctccttcacgctcagcgcgtaggaggccggcgcgaggatcgccaggttggtggtggaggtggcttgcaggaagcccgcgttgggcttggccagcaccagcttgacggtgaagtcgtcgaccacttcggcgtggtcataacccgccaggtaggtggcgccgaaggtggccggcagttcggtggccagtgccttgtcgctgtcaaacgcggttttcaccgccttggcatcgaagcgttcgccgttgctgaaggtcacgtcctcccgcaggtggaaggtataggtcagcgcgtcgtcactgacttcccagcgtttggccagccagggaatgatcttgccggtgtccgggtcctggtcggtcagggactcggcgacgttgcgcagcagcacgcggtgctccagccaatagacctggaacgggtcgacgctgaccagggtggtgttatcgccgaaaaatgcgatgttcagggtcttgcccgcctgtggggcatgcccgggcgagcaggcggcgaggctcagcgccagggcgcagggggccagcagacggctcatcaagttggcggtattcaatggggtgccctcatgtggcgtgtggatcagaagtcgtaggcgagcttggtgtaccagtagccaccgcctgggtagaacggcgggttgccgtaggcggccaggccgaggttgctgtacaccgcgtttttgtcggggcgcacgtcgaagatgttggtgccgccgatgctcacggtgaggtggtcgatgaaggtgtagctgacgtccaggtcggtgatccatttggcgccgaagctgcggtcgccggtggggttgacggccagggtcttgaccgcgccgtagcgcgcggtttgcaggttgacggccaggtcctcgaccttccagttggcgcccaggatccacttggtcttgggtgacgcgtcggtcaggtcgccttcgcggtcgcggccgaccagggtcacgccggaaccggccagtgccgccggtgtgtcgcgtgtgccttcaatcgtggtcttgttccagttgaagcccaggctccagcgcacatcgccccaggcctccagcggtgtggtgtggtcggcgaccacgtccaggcccttggtgcgcgtgtcgaaggcgttggtgtagtagttgacccaggtgccggtcggtacaccctgggcggcgagaatggcgttgatcgcgccgttgccacggtcgtagatattgctggtgagggcgatgcggtcatcgatgtcgatcaggtaggcatccgcggtgatgctggtgcgcggcgccggttgccaggtcaggcccagccccaggttgcgcgatttttccggttttaggtcatcgccgcccagcgccttggccaggttgctgccggacggcgtcaggcgcgtcacggccggcaccacgttgccgttcacatcgacggccacgcggttgtcggccacggtgtagccgatctgggtcagggaaggcgcgcggaaaccggtgcccagggtaccgcgcacggctacggtgtcggtgagttcgtagcgtgagttcactttcaggccgaaggtgttgcccgaatcatcgtcgtagtgctcgacccgcccggcgacgtcgagaaaccagcggtccgtcaggtcgaaacccaggtccaggtagccggcgtagttattgcggatcaggctgacttcatcttccggacgaatcgtcaccgccgcctgtgcgccagacgcggcagggtaggtaccggtgatataggcctcgcgctcgccggcgaacgtactgaaatgctcccagcgatgttccaggcctgcggatacctgcaccggcggcgtcaggttgaacaggctgtcgtagcggcgggtgaagtcgaggttgttgacccactgctcgaagcggaaggtcgccaggttatcgaacctggtcggcgacgcggtgcccagcgacgggttgatattcaggtcgctggagtggtgcacgttgttgcgcccgtaggtggtgctcaggtcccagttccagtcggccaccaggcccttgccgccgaacagcaactggtagtcgcggtccttgatgttgttgagtgggaagtaaccgtcgggaaacacctcgggcactgcggcggtgccggtcggcaggcggaagtagttggcggcctcggcgtcgcgttcgccgtaggtggagaacgaatatagtgtcaggtcttccagcggcagttcggcgttgtaggccaggttgaaggccttgaggtccgggtcgccgttcttgatcgccacgcggtcccaggccgcttccttggccgggtcggcaaacgcccgcacgctgctgtcggccttgtcgttccacgacgcgctgccacgtttgcgcgcatcggccgagaagtgaaagaagccgccctggcccagttcgaagccctggtcacccgcgaccttgatggtctcgccctggccggaatacaactgaccgtagctggtctccaggtggccgccgcttttcccggacttgaggatgatgttgatcacgcctgcgactgcatcggaaccgtactgtgcagccgcgctgtctttgagcacctcgatatggtccaccgcgctgaccgggatcaggtcgatgtccaccgcattcgcaccgctgttatcgatggaaccgcgctggccggtggcgccgttatgccggcgtttaccgttgaccagcaccagggtgtaggccggtcccaggctgcggttgctcagcgggcgcgtcaccgagttgtagccggcgatgttggtgccgaagttgaaagaaggcagcagcttggcaatcgcctcggacaactcggcgcgcccggtcttgagcaattggtcgctgttgatcacatcgatcggcgccgggctgtcggccactgtgcgttgctggccacgcaggccggtggaaatcacggtgacggtatcgagcgtggcatcgtcggcgaaggcgggcgcagcggccaggagcagggagccggtcagcagcgaaagaggcaacttcttgagggacgtggggagtgcgatgtctggcatggagataacctggagggtgggggtgcgtcctccgccaggtatggggtcggtctgtgaagtgaagatatctctataaaaaacggtcgggaaagtcttttttggaataagctaattatcagttaatattatttatatctaaaataagattaactatttttattatgaaaaacaggcgtgctgcttatcgcccatgtcgactacattccaaggggtgcttggcggctatcgcgactattggactccaggcccatcactgccgcctggcatacagaagaatttggcgcgaggcaaacctctacctcatttatgaggtgctcgagggggctttcgattagggcgccgaagcctgacggtgggggcaccgcaccggcgcactcggatgatgactcaggctcgacgctttccagccatcaggcctgcaccgcagggcctttcaactcgatctgattatcatcagggtcattgagatacatcgacaacccggttccctccgcgccataccgcatcacggccgcttcagcggataccccggccgccgccaggtgctggagaatggcctgttcatcgaacggctcgacccgcaggcaaacgtgatcgacattgtgtctttgcttgcccgccggctgcccaccctgacgcccgatcggtccgttcacatcaaccaggtcaatcatggatgtgccagcactcaggtgaatcatgccgaggtcatcacggcgttttttgacatcacaccccagcacggatgtgtagaacgccaggctgcgctcaatgtccttgacccgcaaaacaacatgatcgatacgttgaagggtaaaactgcgcatttccatcactcctgatgcttgccgttgtcgaatgggacattgttcagggtagccgcagtttgagtgcactcaaggctggcagggtcgaaggccggatattcaaatggccgcaataggctagaggcagataacatgaaagagtggtcgtcgctgcgcaagtcgaaggtggggggtgtcgttgatctacgggaacaacgcgtgctcgccatggacgacggcgcgtacaagatttcagataatcaatattttttagctgacgcctgttctgttgagggagaggaaaaactgagtttgctatccctctactgggccagcagtgaggctgcatttcgaagggcctactacagggatgttgaaaatgatgacctggctgtatgccaaccgccggctgaattacttccagctggggcgggtgcgacctaccgtcagataaaagaggcgcttggcgctcttggttctgacaggttaatggagtacgcctcttatcgtgttatgtctgacggtgcatttgttcataagggcttggaaagcgcatcggctgtttattattttcggtcgcatgacattgctcatgatgagatgccttacgcgatactgtggaagcttttcagtgtttgattaatgaacgtcagggccctgcggtcaggttgaagtggtcgtacgcgactcccgaaagtcgacatttgcagtccccggttggtgtttcaacgaaggtgtatgcagagcagtatgtcggccctgggattgctacggcagtgccattgctgcactctcactgctcatttttgtacggggtaacgcatggactggagtgatgtgcgggtctttctcgcgattgcccgtagcgggtcgttgggcgctgccgccaagcagttgggtgtcagccatccgaccgtagggcgacgcttgcaggtgcttgagcagtccagtggccagcccattttcctgcgtaccacccaaggtctggtcctgaccgacagcggggaaaagctgctcagtctggcgcaggaaatggaacaaagtgccttggcaatcgaaaggcgccttgcgggggacagcgcacagccagaaggtgtgttgcgcatttcttgcgccgactggttcgcctgttatgtgctggccccggtcctgaacgaactggggcgacgttatccgctgatcgtgcccgaggtcatcgcagggcatcgattgtttgacctggctcgtcgcgacgccgacattgcctttcggatcgttcctttcactgaacccgatattgtccaccgcaaactgactaccttgagctacgggttatacgcggccgtcggatccgctgaccccgagccgcagggcgacggggtgggtttgatcaccatgagtgttgcccagtctcactatcccgatgtgcaatggctgcagcagcgttaccctctggcccgtaaggtgttcaccagtagcagccgcacagcccaggcgcacatgtgcgcgcaagggcagggtgtcgccgtattgccccgcgtcctgggcgaccagttgacggcgctgcggctgattgatccgcatgaaccgccaccgggtcgcgacatctggatgggttaccaccaggacatgcggcagatggacagtcttcgtgcccttgccgaccttgcctcgggcatgattggctcgcagcagggccgatgattcactctactgggcgcagggctgccgtttgcaattgcacagccggttggcgcgccaggcttaggctgagtcccgcgcccaaggccaggcatgccgcgatgcagagtatggaaacggtgaaggcgtgagtgatggcggccgcgtccgtatccgtgcccagaagggtgtagaaaatgccgcctattatcgccacgctcagtgatgtgctgatttgcagggtagaactggcaatgcccgcaatcatgccggaatacgcgggcgccacgcgtcctgtgatcattcgcatcaatgtcggcagggccagtccttgtccgaaaccgatcagaaacagaatgacggcgaggggctgcgcagggggcgtgacggccatcggtgtgtgcgccacgagccaggccaggagcacgaaccccagcacctcaagccccattccgacggggttcacgtaagcccccaggaaacgcctgaattgaggggtggaaagcgggccgagcaaaaatcccgcgccaaaaggaaggaagatcaggcctgcattgagtgggctcgtatgcagcgctccctgtaaatacatggaaaacagcaggaaaaacacgccgatcgcgtagaaggtcagggcaacgagcagtgcccggcccaacccaggcgtgcgcagcgcggcaggatcaagcaacggtgcgccttgcgcctggtgcaaacgggcttcgtagcgccagaacagccagcccaacagcggtactgccgcaagcgacagccaggcccacaagggccagccggcttcacgcccttcgatcaatggaacgatcagcgccccaagggtcgccatggacaggacggttccacccagatccagcttgcttgtctgttgcgcgcgggtttccctgaccacggcaatggcgatcagaatgaccagcaacgcaatcggtagattaaccagaaatatcgcccgccaccccaagcccatcaagtcgagcgatatcaatatcccgccaagtgcctggccggctaccgacgccagtccaaagaccgcgccatagagactcagcgccaagggcttttcggactcgggaaatatagcctgcgcagaagcgagtgcctggggcgccatgacggctgccgtcacgccttgcagcgaacgtccggcgatcaacacccaaggtgactcggcgacgccgcagatcagtgaggcaactgcgaaaccaaccagcccaaggaaaaacattctcatgcgaccgtagatatcacccagccgtccgccggtaatcagtgtcacggcataaagcgccgcgtatgaggaaatgatcaactgttcggcggaggaggccgtgccgagcgattgctggatcgagggcagcgccacgttcacgatgaaaaaatccagcggcggtaaaaacgcaccgaccaataagatggcgaacatcaaccagcgccgcggttccggtaggacgttttttgtctgtggcataaggtctcctgcctggaacccttcggttccagaatattcacgatggcgggtcatgctccgaatcaatggggcccaatctaaacgatcaaacttgggctgacgcctcacaaaattgaacgcccagcgttcatttatggcagtgccgtcgagtgcctgattcctctcaaaatggccgcactgtggttccagtcggtccacacaaacgagactgaggagtcagatatgtcaggtaaattcgctggtcaggtggcagtggtcaccggcgcatccaccgggatcgggtatgcgattgcgcagggtttgattgcagagggcgccaggcgtgtttacatcactgggcgttctgcagccacgctggaggctgcggtggccaggcttggcgatagagcgatcgcggttatttccgatgtcgcgcgccaggctgatctcgatcagctcaaggcgacgattgaggcccgcaacgatcagttggacgcagtgttcgccaacgcgggtatttgcgaaaagaacccgctgggcgagaccaccgaggcggcgtacttcaacctcttcgacattaacgtgaagggcgtgttttttactgtgcagacgttgatgcctttgttgaaaaacggcgcttcgattgtgctgacggcttctatctgctccagcaatgggatggaaggactgagcctctacaacgcatccaaggctgcagtgcggtccttcgccaggacctgggccaacgaactcaaaggccgcaagatccgaacgaatgtcctgagccctggcttcacccgcacccctttgatggacaacggcttgaagatgagcgaaagcgacattgccgcgctgcgccaccatgtcgagcagatcactccgctggggtacatggcccaacctgaagaaatcgcctcgtcagcgctgttcctcgcatccgccgatgcgaaatatgtcaacggggtggaactgatggtcgacggcgggctgtcgcagatctgacctcccgatcgaacctggtgcaacccttgcagagggttgcttttgtcgcttttgcgaagcccccgcaggacacctcaacatgaacagtgaagaattgaacacccgactggacgccctggaggtcgcgccgccatcgagtcgctgatcagcgcctacgccaatgccttcgatcgcatcgacgtgtcgctcctgagcggaatctggcacgaagagtcgacattggatctgccgggtttcggctcagccggaaatcgtcatgaaatcctggcgatggcgcaaaacagctggcgccagatgccacaaatgcaccactggatggcctacccgatgatcgaaatcaagggtgacagcgcggaggggatggtggctgccgattgcctgttccacgacactgaaaaagggccggtccaagtcagcgggttgtatcacgacaggtttgaacgtcggaacggaaaatggacgttcctgtcacgtcgttttgaactgcatttcctgacaccgttgaacggctgggtacccgtagcgggtgaggagaggtttgcaccaagcgaagatcagaacatgagtaaactcagagaaggttgatttgcggaatgttcaggatgtgacaatcaacttaacgagccaaaatttgccgctgattcggttttgaactcaggggatccagacaagctgcggcgcactgggttagtcggtcatgcaatgttattaaaggttttttttgaagcttgatggggacttcgattacaaactgtcggggtcgccaaaaaacattttgactgggctctagaacagtagtttcagcttggaaaaatagagttatgcccccagttatgcccccaattgcacagggtgtgcgagtgatcgcaaatggcgatctccgacggacttcgctattcctggccagttaagccgttgggccaggtcgctgatcagtcgttaggcaagtgcaactgcacttccatggcgtcatgaaggagtctgacgacatcgatcacgtcgtcgtttgtcacacgatagaacacgatatggcgtgggcttttgaccgttccatgggtttgtttggcctgctggcgtgaatagatgaggtgatagctgcgaaggcccggtgcaagttcatcgcggtcgtggctgccaatgcgataaggcgtgtgggcaagcgcttgcagcgccgcgaggatcagcgcctggtagcgctggcgtgcttgatcgccgaactgcgtctgggagagcctaaggatgtcgacaatgtcggcacgagccgggttggagatccgatactgcggcatgctcagtgtttctctctcgcagggagggttgcctccaggctcaagctctcgaggtagtgctccagatcaccctcgttcacctgagtaaagcgcccgtgctcaagatccatgatgccgatcgaggtcgcctgacgcagtgcctcaattttggcggtgtcttcggcgacgcgctgctccaataaacgtaaaccttctcgcatcacttcgctggcattctgataacggccggactgcaccaagtcatggataacctggtcctggtgaggggtgagcacaacatttcgcgtcgccataactagctccagttctatgcaaacagatacttttgatgttggcatattatgccaatttcgctctggagaatagcttggggccgacatccggcgatcaggtgacggctgacttggcgccaatcagcaaggttcaaagtcatcctcccataatgaaagcaaccggcagattgatttgaagattgatatgcctgactgtgcgtgggaggaggcgcgcgatgtgtgcttctcgatccgccctgaaatcgatcggcatgttcgatgcccatcaatatttgcgtttagaggcaccaagagaggttccaatgccctacgagttagaaaatcgcctagtgatcggcgtcgcttccagcgctgtgtttgatttgctggcatcggacgcagtgtttcagagtcagggggaggaggaataccgcaagtttcagcaaaacaatctgcacgtcccgcttcctaaggggatagcgttccccttcatcaagcgtttactgtcagtgaatgacctgagcgtcgatcctacggatccgctcgtcgaggtgatacttctttcgcgcaatgatcccgacactgggctgcgcgtactgaagactatcgagcattatgggcttgggatgacaagggcgattttcatgcagggaaaatctccttatgaatacataccagcactgaatatcgctttatttttgtcgggtgacaaaaaagacgtggaagcggctatcagggccgggtacccggctggccaggttctcgattcgaaatttgaagacgacgagactgataaaaccctacgcatcgcattcgactttgacggcgtgctcgctggcgatgagtccgaaacaatcatgcaggcctctggattgtctgagttccatgcgcacgaagtgaagaacgttatgcagccccataaccctgggccgctgaaggaattcatggtgcggatatccaaaatccagtcggtcgaggagaagcacaaaaagctcaatcctgaatacgaaaaccgcatacgcgtctcgatcgtcacagcccgcaatgctccgtctcatgagcgtgcgatgaatacactcaagagttggggtgtcatggccaatgacgcattcttcctgggtggcatcgagaaaggcaaaattttaggcgtattgaaaccacacatcttcttcgatgaccaatcagggcaccttaaatcgactagcgcagttgctccatccgtgcacattcctttcggcatcaccaaccatgtcgcgacagtggttgcgctagagcctgaagctgatcaggtccagcaggtgatgtaatacggaggattgagcgcgtaatgctaaaggagtccgtataggttcctcgggcagtccgagatcggatggggtaattaggattgctcgcgaacctgcatccagtcgaaaaaatcttcggatgcaaagccaacgctgcagttggcgtcgaaccgctcgttgattctgatgagcgtcatccgcttagcttcttgtggagaggtcgggaagaaagctccaccaggttcgctgtgcatgaagaaatcgccgagctttgctccgcagttttcgcagtgattcatcaggtagcggctgcctgccgttttgctgtaggcctgcctgaacttgttggtgaagtgatggatctgcttcgtgaccaagggagagaggctggcgacgttggagaccgttccgcgatacccattgcacttccattcgccgaggttgcttgtgagcgcgaaatcttcgtcctcatcctcgtagtaatcgaactcttcgtgttgctcgggcagcttgaacgagaacacgcgggtcaaattagagcagccccagcactcggacacggactctatgacgtagtaatacggtgctcttacactaaattcaggtccgtgctccaagtctgcatgcgttgttacggacagccattgagccaagggggcgatgtcgacaccttccgggatgtaccaagtcttcaggcttgggtcccatctggcaccgagtgatttcgcttcatctttttctgagaaggggactttcagatcaatccttgccatttctgtatccgtacgtattgctcatcagtaagcgcagctttaacctgaagcgactatggaatcttgatacctaaagcattcaacgatggcgtatccatccggccattcacggtcagcccactgtccatctgaaaggccatcaacgcaccacgtgtcgtcttgcccatcactccatcaatggcgccttggtaatactggcgcaccatcagcgcggtctgcacacgggtgaccaggttgcttttctgctcattggtcgcgcggctcttagaagtgctcgaacttgtcccgctggtagtgccagacgactgataaaggctgttgctgcttggggtgctgctcgaagcactcggcgcgctgtagcttcgggtgctggtagcgggtgggctgtagtagcgaggtgcgctatagccacccgagccgctgtagtgagaactgtgcgagctgtgggagctatgtgaactgtgcgagcgatgtgccgcatagatgttcacggcgtctggaacattcagcgtatcggcaaataccggtggttgcagcttgtcggcaggctgccagttcgcatcggcgagcgacatattgcccgcctgtgccagggtggtacctgccatcggcagcagggtgatcccactgatcaggactttccagcggtcaagcaatttcactgtgcactccttgcgtaggcgctaaaggcctcggtcgataggtgtcgtacgccgcggctctgccagcggtcggtgtgggatttgaagaagccggagcaatgtttgacggctgcgcattgctggcagctatcgatgaacaggttcttccagtccgagatgctctgccgggcgaaacgcgagaggtgggccgggatcaggcacaggggcaggttgtagatcgaaaccggcactcctcggttgaacaggaaatacacggcctggctcaacgactcctgatagtccagcgggtcaatccacagatcttcgtagtttttcctggccaggccggtgctttcgatacccatcagcgcaacatgccgcacgaaggacaggttcctgaaaacgtagtgggcgagctctggcaagcgtggcgcggtcaggcgattgagcaccacgcgtatctcgatgatctggttggcgcgcgccaggttgtaaagaccttgcagggtttcgctgaacgcgcctggagcctgcaccacatggtcatggtcctcggcattgtcggcatacaagggtatgccccagctcaactgatggtggccgattgcagagagcgctgcgatccagctcgggtcttggaacagacgcccgttgctgagtacatgaatggatttctgtggcaaaacggctttgcacttggccaggatttccagcaggccgtcgcgataaagcgttggttctccaccgctgattcccagattttcttcgcccgggtccatcaggtcgatcagccggaggttctcctcgatgtgccagcggtcatcgatatcttttggcggctgcgagcacatcaggcagaggctgttgcaacggtcggtcatgaacagcaggttgctgtctgagcctcgtcgatagagcactcgcaccaacgcgttgcctggtgtgatggcaatgacatcgccgggctgcacgacatccgcatctttgggggtgtgcaggtgtggccgcgcgctatcgaagttgccgatcaatggctcagggatcaggaatccacccactggtaatgagagcagatgcgggctccgtagccgttcttcgtttggcagccaaagcaacaggtcaccgagcccagcgcttccggcacaaacagccaagcctttttcgatgaactcatccagagtgatgaccttgagcagtttctgctcattaagatgatggatttcgaaatgggtatctttgcgtagcatcgccatcagcccctgtaacccggaaatcgaacatcgttgtaagagcgcctgttcaaccacgacagcagcaccctttggacgttgtcgtcgccatcgcaaagcaggccgaaaagatgcttcagcagccccatgttctttttgcagaagctgctgaacactcggtgtccgatcgggtcagcttggcgggcatagtgttcgatagggtcggcaccacagtacgggacaagtgcgcagtcggagcagcccggcagcgcctctgctacaccactggcgagcaacgcattcataacgggcgatgcgagtaattcagacaagggttggtgtacggtgccgagcctaaagccttcttcacccatctccagcaacattcgggcttcgtccgacggatagacgtaaccgtcatagttgtaaaccagcgccgcagtgcctgcgccagcaggggagcggaggtctacatagccggaggagaagggtgtcaggatattcttcagcaacaggctcgtataactctctgagaggtatacgcccttttggttgatatgcagcaaataggccagtgccttcttgtagaaggccaggtatcgctcaatagggtaatcaagtcgatgggcactcttggtggcaaacccataagggctcagaggccgaagcgagatgctggagaagccctggcttacatactcatcgatgatcgcttcaggctgttcgaggcttcttgaagtcagcgtggtcaacgcggaaactgcatcatggccaaggcgctcacggacccactggatgccttttacagtgcgctcgtaggagtctcgtgacggggtagggcggttggcattgtgcaagggcgccggcccatcgagcgaggtcgaaaactggatgcgatattcttctgcgaagtcgagtatttcctccgtcagatggtgcagtgtggtggtgatgacgaactggatatcccgttgttcgaccacgttccgttcgacgacccattcgacaatctggcggacgcgctcgaaggccagaagcggctcgccaccctgaaactccacagtcaaggcgggagcgttcgattcgaacagacgattgaccgccgcctgtgcatccgcttccgacagatcgtggccggatcctcccagaggggcccgcgacacctggcagtactggcaggtgtggttgcagcgcaatgtaaccacgaacaagtgcagagcagggccctggaagaggaagtccttgcggctgcgatactgcgcagccatttccgggaacgggtcgtggcggcctggttcatagatgaagtggcgggccagcaggtccttgtaaaaaggcgtacttgcttgaacgtcgaagtaactgagggctcgtaattgcgcgtcgttcacgtgcatgtactcaccggtatcggaggtgagcaggatgtcacggtcatgtcccgtgttcatgcgcatgaatcgaaaaggcagcaagcggtagtgcttggcgtctgtcgcaatcagtgtcactgcgaaaccccacatccagcgagagcggctcgggccaggacctcgcgcaatcctactgtttcgcgattgatatggtcgcgtagggcgaagtcgttcagatgctggaggatcagtgagtgagcctgctccggggaaagcgttagccttgcttcagcggggtgggccgtgagacttatctgattggtttcaataccgacctggatcgcgacagtgtcggcaagggaataagcggcgcgttgcaccacgctgagcgggtaggcttcgctgtcgagtttcagcgtgacaggccatgtcatcggaaccgctccttcaaatccgttggaaacgtgtggattttgcaggttgccgaggcattatgccatcataattttttacatttgcacgcatttgtccagcgtggtgggtggtgcgctcactacggctcggccattgatacgaggtagggccgaggcttcgtatctccctcagtccacccattctcatcaatagcctgcttggcgtcaggctgggggcatccttttcaaaccatccaatgcatgccctcagatatgcccccaatgcagcaatccaccggaagtgagtggaactccatggtttgtggaaaggcagaaatgatcagccgaacagcctgccagacgacgtctaaagactctcagggtcgccaaaaaacattttgacttggctctggaacggtcttttaaggtccgaaaaacttttcgatgcccccattttggcccccacggcgaacatctttattgatcagcggtggctgttcgcgagggcgcttggcggccttgagaatccgggtgcgcgaggttgactcgagcagggatagggttgcgcggtgaattcggtctctgccgcgtcttgcgacttgatatcaacatttcaacgccgaaacaaaatcatacatttaattgacgccatcaaatcgccactctaagatcgccgaaaaaaatagtggcacaaggccacttagagggatctagaaatgtggcgttcggtacgtcggaccaggctttgcctgctgttcgcatttttttgcctgagcacggccgggatggcccaaggcgcaaccccgcagaacacgccaggcgtcaccgacctgatccgtgaccgtcaggatcgcctgctcgaagagcaacagcgccgcctcgaagagctcaaggacctgcccggcaaagccgccgccccagccaagctgacagcgcccgccgacactcgctgtttcgccatcaacaccattgaactcagcggcgccgacgcgctgtccgaaggcgagcgcgccagcctaaccaagccctacatcggccaatgtcttggcgtgccgcagctcaatgatctgctcaaggtcatcaccgaccattacttggccaaaggtctggtcaccagtcgcgcctacctgccgcaacaaaacctcggcagtggcaacctcaaggtacaagtggtggaaggccgcttggagggcatgaagggtgcagagggcagcgggatcactgaccgccagctcgccatgacttttccaggccaaaagggtgaattgctcaacctgcgcgaaatcgagcagatggtcgaccaactgaaccgccttccctcaaaccaggcgcagatggaattggcaccgggcaaacaagtcggcggcagcgaggtgttggtcaagaacaccccgcaaaaaccctggcgtgttggtctatctcgccacaacggcggccaacgcagcaccggcgaacaacagtggggcgccagtctcgattgggataacccgctcggcctggctgaccaactctccctgcgtggcgcacacgacgccgtcagcgatcaccagaaaacctcacgcaactcgatgctcaactacaacctgccgtttggctggtggaacctcaattacagctacagcgagactgaataccgctccctggcccaggccagcggcttcaacttcaagcagtccggtgacagccagagccaccagttgcgcttggagcgagtcgtccaccgcgacgctctgagcaagacctccctcagcaccggcgtggcctacctgcgcaccaacaacttcatcgaagacagcaagctcgccctgagcagcaaccgcctcagcgaagcccagtttggcatcaaccacggccggcgcattggcggttcattcctcaacatcgacctgggcatgcaggacggcattggcgcgttcgacgcccaggccaaccacaacccacgccccggccaggccgatgcgcgctaccgcaaatacaccgcgacggtgagctacctgtaccccttcaagctgtggggcgagtcattcagcttcagcagcctgatgaccggccaacgcagcgaagacgtgctgttcagcccgcaacgcatgagcctgggcgggcagtcctcgattcgtggctacaaggaccaaagcctggccggcgatagcggcggctactggcgcaacgacctgcgctggagccgcccggtgacctgggtgtggctgcagccggcgttcaacgaatacggcaccagcctcggctacgaccaaggcgtgatccgccatggtcgctacaacgccgaacagcatgggcgcatgaccagcaattccctggaactgtttgcacgcggcaagaacgtcgcggccacggtgacctttgcacactctttggaacgaccggacccgatcacggaacgtgaagcgccgatctacttccgcatggatttttttctttaaattcttaccgccctttgggcatcgagatacgacatggatgttcgccagttcgccttcctcgcgcgccaaccgtctgcggccgtaaaaagccgttccaccttcctgggcttgcccaagcgcgggttggcgttggtgctggctaacgccatgttctggcagccgctgctggctcaggcggagggcattgccgtgagcgggccgggtaccacactcgggcaagcgggcaatggcgtaccgatcgtcaatattgccgcgccgaatggcaacgggctgtcgcataacaaattccaggattacaacgttggccagcagggcgtgatcctcaacaacgcgaccggtcggacccagtcgacccagttgggcgggatcatcctcggcaaccagaacctcaacggtatggccgccagcgtgatcctcaatgaggtcaacggcggcagtcccagccagttgcgcggtttcaccgaagtggcagggcagtcggcgcatgtcatcgtggctaacccgtatgggattacctgtaacggctgcgggtttatcaacaccccgcaagccacgttgaccaccggtaaagcggtaatcgaaaacggccagatcagtcgctaccaagtcgatcaaggcagcgtgtccatcgaaggcgcaggcctgaacgccaacaacatcgaccagttcgaaatcatcacccgttcggccaagctcaatgccgagattcaagccaaaaacctgacgatcattgccggtgccaacgacgtcgatgccaagaccctcaaggccaccgcacgtgtggccgacccagcaacagccccgcaactggcgatcgactcttcagccctgggcggcatgtacgccggggcgatcaagctggtcagcagcgaagccggtgtcggggtaaaactcgatggcaagatggctgccagcgcaggcgacatccagatcgacgccaacggcgacctgaccgttgcacaagtcgccgccgacggtgcagtgaacatagaggccgtcagcgccagcattcaagggcccgcctacgccggcaccacactggagatgaaaacccgaggcgacctgaccagccagaacaaccttgtcgccaaggaccgcataaccctcaccagcggcggccagttggtcaacaatggcatcatcgaaagcggagtcaatcccgataacacccgcaacaccaacgccgatatcagcatcagcgcgcagagcctcaacaacgccggcaggaacatcattgccagccgtgacctcgacatcaccaccacccagactctgaacaaccagggcggcaccctcagcggacagcggcagaccaccgtcaccgccggcaccttcgacaaccaaaacagggggcggttgctcagcaccgaccgtctgaccttgaccgccgacaaggccgtgaacggccgggacggtctgatctccagcaacggcgacctggtggtgaacgtcggcgcattgggcaatcgcggtggggaaatctccagcctggccgatgtcaccctgaatgtcgccagcctcgacaatacgtccggcttgatcgcggctgacagggggctcagcctcactgccagcggcgcgatcaataaccgtgacggcaccttgtcggcttcaaccctggcgaccttgaaggccgtcagcctggacaatacccgcgggcagattaccggcgatctgggcttgagcatcgacctcagcggtgccttggataaccatgctgggaccctgggttccggcaaggccttgactctggccgccgccagcctcgacaaccgcgcggcgggcacggtgctggcggcggacggcacgctgagtgccgccgttcacggcgcgctggataaccgcgaacagggcaagctgcgcgccacgggcagcatcgagctgaccaccggcagcctggacaaccgcggcggcagcctggcgggcaaggaccacctgaccctacgcggagggtcggcggacaatcgtggcggcctgatccaggccgacaaagacctcaagctgctggtcgatcaactggacaaccgcgacaagggcaaccttgtcgccaaggcggccgtcagcttcgaaggcacccgcctggacaatagcggtggcctgctcagcgcagtcggcccggtcagtctcaaggccaaggaggttgccaacacccagggccgtattgccagccagggtgacctcgaagccagcatcgacagcctcagccagcagggcggggcgctcgtggcccagggttccatacggctgaccggcaagagcctcgacaaccgcaatggcggcacggtcgccagcacccagggcctgaccgtcaatgtcgagcagatcgacaaccgtaccggcgagctgtccagcacccacagcagcgtcagtgtcagcgggcagcgtttggacaacagcgatggcggcaagctgctgactgagactgatcttggcgtcgcagtggcgcaagtgatcaaccagaaccagggccggctgttcgccaggggcagcgtcaacctgaatggcaagaccctggataacagcggcggcaacatcttcgccctgctgggcctggatatccgcctcgatggtgcgctgctcaacaacaccggctcgctcagcagcgaaggtgcgctgggccttacggtcggcagcctggacaacacggccggcaagctcggcagtgccgccgacctgttgatcgacagtctcggcgcggtgctcaaccagggcgggtcgatcctcacggaccagggcctggtgcttgccagcggcagtctcgacaacagccagaaaggcctgatcagcggcgagggtgcgacccgcgtcaccaccagcaccctggataaccaccagggtggccgccttaccagtggcgaccgccttgacttgacggcaacccaggtcaacaacggcgcttccgggcgtattgccagtgccaaggatctgacggccaacgtcaccgtcctcgaccaacagggcggcgaactgttcagcaagacccaactgaacctggacctgcacaacggccgcctggacaacagtggcggcctgatcaacggcccgctgctggtgctgaagaacctcgacgtggtcgtcaaccagggcggtgaaatctccagtgcccaagcctttgccctgaccgcgaaaagcctcgacaacagcaacggcaagctgctgagcaaccagggcctgaccctgcgtatcgatcaggcgctgggcaacatcaagggcctggtggccgcggcttctctcgacagtcgtagcgccagcctggacaacagccagggcctgatcagcagccgcggtgcggtcgacctcggcgtaagcggggcgttcatcaaccagggcggcaccctggtgggcgatggcgctatcctgttgacggccaacagcctggataacagcaacggtgccgtttccggaaaagccgatgtcaaagcgaacattgctgctctggataaccgcaacggcaagctgatcgccagcagcgcgctagccctgagcggcgcctccgtggataaccggctgaacggcctggtaggggcgacaaaagcgctgacactcgatgtcgacgttatcgacaaccgccgcggtgaactctccagcagtgccgatattcgcctgaccggcaagcgcctgaacaacagcgacagcggcaagctccttgccgataccacgctgacccttgaaatggccgaagtgttcaaccgcaacctgggactgctcaagggcaagactggcatcacgctggacggccaggccctcgacaacaccggcggccaactattcagcgaccaggacgcacgactcaccctcggcgctgacctcgacaacagcgctggcctgatcagcagcgaaggccggctggacgtcagcagcgtcgggctgaccaacacggccggtagtctgtcgagtggcggcgcgctcaacgtcaaggccaacggcacactggccaaccagggtggacgcctggtcagcgacagcagcatcaacctgaacagtgccagtctcgacaacacccggctgggagtgatcagcggtaaaggtgcggtgactgtcactaccggcgcctacgacaatcgcaccggcagcctgagcagcagcgacagcctcgccctgacggcagggcaggtcagcaaccagagcggccgcatcggcagcgacaaggccctagtcgccagtgtcaccggcctggaccagcaggacggcaagctcttcagcaacacggcactgatcctggacctgaacaacggccaactgaacaaccagaacggcctgatcaacgcaccgtcattgcggctcaacgacctcaagggcgtgaacaaccagggcggtgaaatctccagtgcccaggccttcgtgctggccgccgacagcctggacaacagcagcggcaaactgctgagcagccaggccgtgactctgcggatcaaccaggcactgagcaacctcaagggccagatcgccgccgccgcgctcgatatccgcagcgccagcctcgacaacagcggcggtaccgtcaccagccggggcgacctcgacctgaccaccggcggtcaactgaacaaccgcgaccagggcctgataaacgccgcccaagccctgaacgtcagcgccgccgacctcgacaacaggggcggtaccctactgggtgccagcaccgtgaccctcaacgccatagccctgaacaacagcgccaagggcctgatcaacagccaggccggcctgacgatcaacgccagccgcctggactcaggcaatggcggcgaagtctcggccaagggcgatatcgacctgagcctcggcgccctggcccagaacggcggccgcctgctcggcgaccaagccatccgcctcgacctggcggggggtgatctcgacaaccgcaacggcctgtttaacgccaagggccccctgaccatcaatcgtctgcatgacctgaacaaccagggcggcgagctctccagcagccaaagcttcaatctcaccggacggacgctggacaatagcggcggcaagctgataagcagcaaccagttgggcatgaccggcaacagcctgatcaaccagggcggcctggtttccggctggcaggggctgaccgtcagcggcgcgagcctggacaaccgcaacagcggcaccttgtccagtcgcagcggcaaccttgatgtcaacgtgagcggcgcattgctcaacagcaatgctggtgcgctggtcagtcagcagaccctgaccgtcaacgcggctagcctcgacaacagcgccggtattctttccagtggcgcggaccagcgcctgacggtcagcggtttgttgaacaacgcccagggcggctccatcgacagcgccgccaccctgacactgcaagctatgagcctaaacaacagcggtagcatcagcgcgcaacaggccctggatttcaccggcaacatcctggacaaccgtaacggttccctgagcggcaaggccgcggtcagcctcgacctgctcggcgccctgaccaacagcaatggccagctcgccagcggaggaccgctggtgatcaggcgcagcagccagatcgacaatcagggcggccaactggtcagccaagggggcctcagtctgctcaccggcagcctggataaccgcaatcgcggcaccgtcgcagcgaatgacaacttggtgatcagcagcagcggtgccgtacagaacaacagtgacggcctgatctacagccagaacggtggcgtccgcgtcgacgccgcgagcctcgcaaacgccaagggttccctgcaagggcaaggcacactggacctgacggtcagcggcgatatcgacaatcagagcggtaagctgattagccagaatggcgacctcagtgtcagcacggccagcctcgacaaccgtggcggcaccctggccagcctcaagggcgccttcgaagcccacgtcgtcggcgtgctgaaaaacggctatgacctgagcaacaatcgccagggcggcatcattcaggcccagcgtctcaacctcagcgccctgggcgggatcgacaactacggcgggcgtatcgcggcgcaaagcggcgatgccctgatcaccaccgccgacttcgacaaccgcaacggcggcctgtacgcccagggcctggtacaggtcagcggcaacaacttcgacaacagcggcgacaacgacggacagatcgcaggccagcgcatcgacctcagcctcaacggcgcgcttaacaaccgcctgggcgttattgaaagcgacagcagtttgagcgtgcgtgcggccagcctcgataaccagaccggccagatccgtgcactgggctccggcggcaagaccgacttccagatcggcggcctgttcgataaccgcaacggcaagctggaaaccgccaacagcgacctgaccctcaatgccagcagcttccagaatatgggcggcagtctgctgcatgtgggtaacggcacctttgatatcagcaccgccaatatcaccaacgccggcggcagcctgttaacccgtggcggcctgaccttgacggcggacaactggaccaacagcagcgtgatccaggccgggcgcctgacggtgaacgtcaacaccctcaaccagacggcgggcggacaactgctggcctcggacagcctgaccggcaacggtggcaattggaacaacgatgggctgatcgccagtgacggcacggccaacctgaccctggccggcacctatggtggtaacgggcgctacagcagcgtcggcaccctgggcttgagcgcggcccaggtaaccctgggcactggcacgagcattgccggtggcggggataccacgatcagtgccggtggcctgagcaacgccgggcgcctgacgtccggcggttccatgacggtcaccgccaatagtatcggcaacaccggcacgctgggagcgacccaggacctgacgctgaagactccctccctggtgaacgatcacggcctgatcttcagcggccgaaacatggacttgctggtcaatgacttcaccaacgacaacggggatgtctacagcatcggcaacctgaacatctcgggactcaatggcggtcgcgccaatagcgtgaccaacctggcgtcctcgatcaatgtcgagggggatttctcgctgtcggcgaacagcttcaacaacaagaccgaaggggttatcggcaaagagcggctggtgtcgggcgatatcacgtttaacggcagcacgttctatatcgccgaaaactacacctcggagtcgaccatcagcggcacgcgagcgagcctggcggtggccggaaacattgatggcgatgtcggccgcttttccaacaccgcttcgacgatttctgctggcaagaatattcgcttgaacgtggataccttcgagaacctggggttggaggccggcaacttcgcccgtaaccgggtctataccggcgtgcgcaatatcttcactaacaaaacttacgcgaacgaagcgctggacgcctacgcgcgaagatattcccagtacgtctaccgatacaccaagaccgtgcatgagcccgacaaaggcgggactcacaccgagctcaacgattacggcaaacaaaaaaccacaaccgtgaacaccaaattcggtcagggaccggatgtggccattcccgccggcatcctggccggcaccctgagcagcgacaacaaagtgtttaccgccgggggtggcagtgtcgcctcggtggtccaggccgggcaggcgatacagatcaacgccaagaacaccatcgacaacagcaacctgcacgccaatacccagttctccgggacgacgaagaccgggaccgggacccaggtcggcagcgcggccaagccgacggtcgtctacctgaatccgcaactgccgccgaacctgtcccagcagcgggtggaccccgtggcgtcgcggggtttcagcctgccggacggacaaaacggtctgttccgcctgagcggccagggcggttctgcggcccaggcaagccaaaccagtgccgggccacagagctggagcatgggcagcgcgacagtcagcagtgcccagcgcgaacagggcgcggatgacgtccaggcgcgcaacctgcagttcagcgatgcggcgcggatcgccgtgagcactcttcaactcggacaaagtacccgccaggccacgggcgctggggtttccggcagcgtgatcagtgtcagtgcgcccggcgattccggcagtgtccagttgccggggcaggcgggcgtggtttccacggtaggcagccaggtcatcaatcgcgtgcagggcctgccggacacttcgggcaggtccaacccgcagaagtacctgatcgaaaccaacccggtgctgaccgacctcaagcagttcatgagttcggactacctgctggcgaacctcggttacaaccccgatcaaagcgccaaacgcctgggcgacggtttctatgagcagaagctgatccagcaggcgatggtcgagcgtaccgggcagcgtttcatcgacggccagacctccgacgaagcgctttacaagtacctgatggacaacgccatcaagagcaagcagcagctcgacctgtcggttggggtcagcctgacctcccagcaggtcgcggcgctgacccacgatatcgtctggctcgaagagcatgaagtgaatggtgagaaagtcctggtgccggtgctctacctggcccaggcgaccaatcgcctggcgccaaacggggcgctgatccagggcggggatgtgacgctgattgccggcaaagacctgaataacgctggtacgttgcgggccagcaacaacctttccgcgaccgcgggtaatgatctggtcaacagcggtttgattgaggccggtaaccgcctggatctgctggcgggtaacgacattatcaacaaggcgggcggggtcatcgcggggcgtgacgtcaatatgactgcaatcgccggcgatgtgatcaaccaacgcacggtggtgggtaatgacgtcaattacaaaggttacagcgggcacaacgagtatgccgacagtggcgctcgcatcgaggcggcgaatgacctgaccatcaaggcctcgcgggatttcgtcagcactggcagtacgttgcaaagcggcggtgacacaacgatcaccgcaggccgggatgccttcattgctgccgctgagcagcacaacagcgtggcggccggcgccaagagcagcagcgttacccagtacggctcggatctgacggtggggcgtgacctttctgtccaggcggggcgtgatctggcagtggtcgccagccagatagaggccaagcgggacatcgactttggagcgggcgataaccttacggtggcttcggctgccgatgaaagccactcgtattccaagtcgaagaaagttacgaaacaggaagatcacgtcaaacagatttccagcgtcgtgagtgccggacaagacgttactttcagtgccggcaaagatatggcgctgatctcgagtcggatcaatgccggcaacgaggcttacctggcagcggttggacaactggatgtactggcggcccaggacaccgactactcgctgtatgacaagaagaagaagggcagctggggacgcaagcagaccaaacacgatgaggtgacaaaaaccatcaacgttggcacccagatcaccacggggagtgatctgacgctggtcagtggtggtgaccagcgttatcaggtcgcgaagcttgaaagtggcgcggatctgacactgagaagtggcggagccatcaccttcgagggcgtcaaggatctgagccaggaaagccacgagaagaccaacaatagcctcgcgtggaattcatcgaagggtaagggccataccgacgaaaccttgcgccagagcgaattgatcagcaagggcgacctggcgatcactgccgccaagggtctgcacatcgacatcaagcagattgaccagaagacggttagccagaccatcgatgcgatggttcaggcggatccccaactggcctggctcaaagaagccgagcagcgtggcgatgtcgattggcagcgcgtgaaagaggtccacgactccttcaaatacagcaactccggcatgggcatgggcgcaatgctggcggtggtcattatcgtaacggtagtgacggcgggttcgggaacggccgctaccgttggcgccagcgcaagcggcgccgcgacagccgcggggctcagtgcgaccactgccgccgcgattggtgcggctgcatcggcagcctataccgctgccgtggtccagactgtggtcagtacgataaacaacaaaggcaacctgagcgcggtccttaaggatgtcacctcgacggaaagcctcaaggggtatttggtcagtgggctggttgcgggctttgcatcgggtgtactggacaaggcgttcggtgtttccgccgaaaatgccagtaaagcgacccacggctttgacctggccagcaccaatgaactgaccaagtttgttggctacaccctggctgaaaagggctttggtgcagttgccaatactgcgatcaatggtggcagcctcaagaacaatctggcccaggccagtatcagtgcggctgcggatgtcctctcggcctccatctataaccggttgggtacccagttggaattcaccgggattccggccaaggtcggggcacacgcgattgtcggtggcctgatcgcagaggcggcgggaggcagctttcgtaccggtgcccttgccgccggtgccaacgaagcttttgtcgcttcggtcggcgacaagatctttgtgggcgacatgcatgatcaactgctggcgatgacctcgcagttgatcggcgtaacggtcgctggagccgcagggggctctgataaagaactggaagtggcgggctgggtcacccagcaggccaccaagttcaacagcctcgatcacccaactgccgagcgattgcttaacgagctgaaggcctgtaggtccggtggaaattgcaccgaagcgaaacagcgcgatctgataggcaagtatgaaaagatctcggccgaacgttcgcagttgatcgacctatgtgaaacccgggcctgtgtcgaaggcctgaaagccaataccatcgctatggacgacccggttgcgcaggagttggtcagcttctaccggaacaaggtttcctatgacatgaccgggatgctggtgggcaatccagggctcatcgcgcaaccggcgcaagggtatgacccttggggcaatatctatgtgaccgatgaccagatcatcacggccaaatacatcaaggaaggctggttgacgcccgccgagagcgccaatctcaaggagtgggagaacaagacctcctggctggacgatgcggcgggtcggaaactcagtgtggtcgaaagagccgccatgatcagcaacatgggcaatacgttgctgaccgagggctgggggaccaaggttgttgcgggtgtcggtaaaggtgggaaacccggcaatggtgtgtcgacggatgccgatggggtcggaaatagcgccgttgttacgaaaccggtcaagccatgctgtttcgccgcaggaactatggttgccaccccccagggcccccgggccattgacaccctcagcgtgggagatattgtctggagtaagcgagaaacaggaggggagccgttcgctgccgctatttcggctacacacgttcgtactgatcagccgatttaccagctcaagttgaaaaacatccgagcagatggagtttcagagaaagaaacgcttctggttacaccgggccatccattttacgttcccgcacgacatgactttgtgccggttatccagcttaaatcaggcgatttacttcagtcgttagggggcggtcctactgaaggtgtctcgaccagggttgagtctctggagttgtttcttccacaaggaaaaacctataacctgaccgtggaagttggtcatacgttttatgtgggtaagttgaagacctgggtgcacaacgttggtctgtgcgatattaatggcaagcctgtagtgccgaggaatgccaagaatctggaaggcggacctctggagaaagccgataagttcagtgggcattttatgctggagggagggcctgccaatggaactctttatcgtgctgataataaaggaaatataacgagttatgccgtttatgatgataaaggtatgattctcaaacgggtcgatgtgacgggcgattcacatgcagggatacccacgcctcatgctattgactatggtcgcaacaagttgccggatggatcgatcagggtacaatctccatcgagcaagaaacctccacggggcatcagtgcagaagaaattccatgaaaataatcaagattacagactcagtcagttctccaagatacgagcattggaaaagccaatgggaggatcagtccgagttggatgagttttcttatattagtgatgttgtgcatcctgaagatgccttgttgttttgcaaggttttatttccagattttgtcattcatgaatcaggtgtgtttctggagcacagctttacttttgacgcgttctctacttggatggaaacttgtaataatgatgtagtggcagtggagaaggttttgaatcatacgcatctgtatgatgtttttggaggttgtagggatagagtggatgaggctgtttatgaacagctttgcaggattgttgctcagtcatggaggatggtgttgctgagtaaatttccagaaaagaaattttgtgtgcaagcgatagtctccgatcaggaatatggcccagtggttactttttctcaggtcagagactagtttttatggatgccttctaatctatagttttttatggtgggaatttcggtttgatcgctcccacgccccagagtggtagcttttcaccggacgctctgcatccgctctttgtgacacagagtgtcacgggctgcattccacgccggagcgtgggaatgatcgcattacaggctatcggggtctccggactccagcggatatgatggtctgcgcctgattcgagaggagagcacttctgtaagcgctccatgaaccccaccttcaaagcgcttagctgatctcggatgctgtgctctcgattctctcaggagccagcacaccatgatgcgacccgatgccaaagtcgaaaaagtctatctctatcccaaacccgtgtactttcgaaaatccattgatggccttgctgcgctggtcgagctggatatcaaagtcgcggtattcgaccctgtgcttgcctaagccttgtggcttttgcgggcgtatattctttgcagccgattcttgaagctgattgagccggcgttttccgcgttcggccagcagccacataatcgtgccgatacccgctatgacaccgatcgctatccaggcgtttttggggatcgcagcgagagcactgaatgccatagcaaaaataataagtatgccggtgccaccggagttttttgctttcttccttgccatgtgtcatttcaaccttgaaagatgggtactggcgcaatggcggtatccaatatttctaacgcttgagccaatggcttggctgagcagataatcggaaagttgaacgatctgggatggaaatgtcatttcagctcgaaatttaatgcttagcgtatttcatctgaacgtcgcgacatttacgtgagccatcctcagtaatttcaagcaacagtagtgaggcctatctgacaacgacctgagtctaacggagccttccgcccccattaatagatacggaccacatgcccaggcggacattcctgcgggactttcagtgaatcacgccgctcgagcatccgtgtttgccggcaggagcggacaatttccagcgcttgagcgaatgtgcttgatcccccccctgcatcggcgctacggggtagcgtaggcagtagttcagccattaactgaggtcatcgactagcgctcaacggcggttgggaacagtgcaggggagacttttcgaaaatggaactgttgggcctcaggctgggggcatccttttcaaaccatccaaagcatgccctcagatgtgcccccaatgtagcaatccaccggaagtgaatggagctccatggtttgtggaaaggcagaaatgatcagccgaacagcctgccagacgacgtctaaagactctcagggtccccaaaaaacatctgaatccgcgaccgcaaccaccgctctcccgggtcgttatcctgcgacccacgccacgccatgtgcagttcgaagctgcgcaccggcaacggcggatcctccgcccgcaagccccctgccgaggtcaatgcctcggccgcgtagtccggcactgtcgccaggatgtccgtgcccgccagcaacgtacccaggccgttgaattgcggtacggccaataccacgtgacgtttgcggtcgagcttttccaactcttcatcgataaagccgctcaggtcgccggcaaacgacaccagtgcgtgtggccgcgaacagaagtcgtcgaggctcagggagcctggcacgctgtcagcgcgcagcagtttgggcaggctgcggcgcagtactttgcgtttggcgttggccgggaggtcggcggtgtagctgacgccgatggagatttcgccggaggccagcaagccgggcatcaggatgtaattgacgcgacgcaccaccagcacgatgccgggggcttcggcgcgcaggcgtttgagcagttggggcagcagggcgaattcgacgtcgtcggacaggccgatgcggaacaccgctgtgctggtggccgggtcgaactcggcggcgcggctgacggcggtggagatcgagtccagggccggggagagcagggcgaagatttccaccgcccgggccgacggctccatgctgcgaccggtgcgcacgaacagcgggtcatcaaacagcccacgcaagcgcgacaacgccgcgctgatggccggctggccgaggaacagtttctcggcggcgcgggtcacgctgcgctcatgcatcaaggtttcgaatacgatcaagaggttaaggtcgacacgacgcaggtcgttacggttcatcttgtgtcctggaagagtcagcaaacttgacgagagcagccatataagaagaatgaccggcatgaatcttacgggtaaaggctgttactctgcacaggaaaattgagttttcttacaagctctgaggtctattcctcagttgcggaatcaatgacaggcatgtcgactattaatggcgaccggtggtcttacccggaaagcccagatagagttcatggcattagaggttactttgacgaggtttgcgatgtcccgcacgatccgttttcacaagtttggtccggccgaggtgctcaaatgcgaagagcatgcagccgcgcagcccgcaccgggcgaagtgcaggtgcgtgtcgaagcgattggcatcagctggtatgacattctgtggcgccagaacctggcgtcttcccacgcacgcttgccgtccggccttggccatgagatggccggggtggtggtcgccgtcggcgatggcgtggacgatttggccgtgggtgacaaagtcgcaagttttccggctgagagccccaatgattacccggtgtatggcgagcagatcgtcctgccccgttcggccttgacccgctacccggatgtcttgagcccgatcgaagccagcgttcactacacgccgctgttgattgcgtattttgcttatgtggatctggcccgggtcaagcctgggcagtttgccctggtgacagatgccagtcactgtgccggcccgtcctttgtgcaactgggcaaggccctgggtgtgcgggtgattgccgcgaccaaagacagcgcggagcgcgagtacctgctgtccctcggtgcggaaaaggtcatcgtcaccgaagagcaggacctgctcatgcaaatcaacaaattcaccgacaaccgtggtgtcgacgtggtgttcgatggcttgggtggcccgcagatgtcgttgctcggcgatgtgctggcaccgcgtggcagcctggtgctgtatggcttgcaaggcggtaaccagacgccattcccggcgtgtgcggcgttccagaagaacattcagttctttgtgcactgcattggtaacttcaccggcaaacccgaactgggcatcatccaggaccaggtggccctgcagcgcgccttgcgggatatcaaccaattgaccgccgatcgcgtgttggtgccgctgaaaaccacggtgtttcccttcagccagttcgtggaagcgcaccgctacatggacgaatgcccgtgccgcgaacgcgttgcgttgcaggttgaagctgtttagggcgtaggaagattcttaaaccagccttcctaccacccgccgcatgaggcaaatgcgccatttgacaaggctgaacctgcacagcccgccaggtacccagctggcgctttagcccatgaatccggcctttctctccggcgccgccctggaatccagcgcggcgtctttgtgtgcgcgtgattaatgcaggcgacggtggtttatctgcactggttttcggtcaggttctgtatctattaatcattatttcagcactgataattacgccttcactttcatctcaaggactgagcaatgattgaatatccgacactgcaatcgcgagtgctcgaagcagagactgctgcgcttgtgcggaatcagggaagtagatatatccaggacaatcctcaatccaataagttggaaagtttgttgttttacttgtcaggcacgtcttagattgactggttaaaggcgtgtaggaagttgtcggaacattcctaggttttcagctcggccgcgctttggcctagataaatcgaggggtggagggtttcaaggctgggctgatacccgggagtgtccgtgtcgttttgttgcgcggtgctactgtttatttagcgcctcacaaagtgatgcggaactttctatgcgtgcaatagatcgggcaaacacgctcagtagttgctcgaaactgacatttcaactcaggtagtagaacgatgagcactattcacgaacaggctatgaattatgtttaccagcaagttttgcagcgtttgatcgggcactttaatcgtgcggagcgaacagcgcttcagttgttggtccagcggattgtcgtggccgcgggaggtatggagcaggtgggagactacaaggtgttgatggcccatggtggaggcgaagtcagcagctgtaccttggcattgctgcgggctgcacagctgaccatcgccgggcgagcgccacgaaccttcaagttgcgggtggcaacattgcgccattcgggcatgaccgacagcaggctcgacagcctcaatcagggttacgggcgcttgttccttcacgatgacccgagggttgaactactgatggtggagaaccaggaagtattgcccttcaaccatcaacgcccggcctctgccatggggcgagaaaccagccagcgcaacatgctgatgatcggccacctgagctcaggtgattgccgtgccactttgtgcagcgacacgtatctggcactcggggatttctaccagcgcgtgaccacctggaatggcggggtacatgccctggtcagtggtgattccccgcgcaagcaagggcagtttctggcctggctgaagaaaaccgcccagagcgctggcgttccgatccccagcacctggccgttgtcgctcaccgggttgtttgcgcgcatggacgagtggagcaccagctactaccgcgaggtgtacggtgaacattatgtcgccagtaccaacccgagcaaggcgggtcaccgtcacttggcttacatcagcatcgccgacctgctggaggatgtggatacgcaaatgtcgccgatattgactgaattcatggcgtttgctcccgacccgcttggatttcatttcagccatcctggctactccaatcctctgatgatggctcatctgcgtggcttgcaggcccgctgcctgcgggaccttgactacgaagagggggttcaaggctttatccgccaggcctcgcagttcctgcggcgccagcacctgcccgaggcgtggctggcgcaggtgggcatcggtacagacggtgcgctaacgagtaccgccgcgcagcagttctttgggctggatgaaacacagttggtgtgcctgctgttctcgccgtttatccaccatggggagcggctggaaggctatttacgtcaatgccaccctggcatgctggtggccttgcctgagttgcataaggtcctgcagggcaagcaatcggccgatatgttgcagcagtgggtcagcgacaccagtggcctgccgatgcccttgttgcaacacctctatcgcaagcgtccggtgcccagcgcggttggtaaatcgcgcagtgcaggcgccatggcccacggcaacgcacccgcttgccaattgtccgggcgatgacactgcgcggcgagcgacaagccgacttcgcgtatcaggcggtctaccgctacatgatcaacctgatcaacgaagtcagcaccgatacccgtgtaaagctgccatcgctgcggcaattggcgaggcgcctgaacgtatcgatctcgacgattcaatacgcctactcgctgctggagaaggagggcagggtctactcggtggccaagtcgggttattacgcctggccgctttcagcaagtacggtggcaggcggtagcggcgatttgcttgaccgtctttacgcggcggcacgcagcccgtgcatggcggtgttcagcggcgatgagccggcgctgctggcgtcgctggatggggcgctgttgcgcctcgaacgggagctggtgcgccagtacccgcgtcatctgcaaccctggtcacagccgtgtggcgtatgggagctgcgtgcggcactggccgcgcggtacacctcgtcgcccacgcgttgctggcacgccgacgacatctacatcggggccgacctgcgcggggtgctggatatcctgattgaggtgctgggcctgcgggggaccacggtgatcgttgaatccccctgcgactggctgattttgcgcctgttccaggattgcgcggtgcgcatcatcgagttgccctggaccccggaagggcgcctggacctgatgacccttgaccaactgttgcgcgatgagccggtgcacctggtattgctgtcgtcgaaggtcagcctgccatcaggcaatgccctgcctgcccacgaccgcctcagcctggcacagatgctggaccggtacggttgctggctgctggaaaacgacacttttggcgagctgggtttcaaggagccccaggcggcgctgcgtgaatgggtgaacccggagcggctgatggtgttttcctcgttcgagaaaatactgggggcggaagcgccctacggctatctgttgtcacggcgcatgagcagtgaactgcagcgccagtttttgctgcgctcgttccgcttatcatcgatccgccagcgcgccatcgcccgcctttatcagagcgggcgaatagacccgcacttgcgggcgttacgccaactactgcaggcgcaagcggctgaaatgagcgggcgccttgagcagcatctggggcagcaggtgagttatcggatgccggctgccggggcggcgttctggctgggctccacccaggccgtcgacatgcgccaggtcttcaagcgcctgcttgcccagcaggtcgtgattgcaccgggcgagctgttcagtgtcagcggcctgcatcatcagcacttgcgcgtgagccatacctttcatgggcagcccaacctggagatcgccttggcggccataagcgaggccttgcgtcaggctcaaacgggatgaccgcgtgaagcttctcttactgttgtaggatcgataccgtcgcgcagcagtccaactctcagtaaactgccatttttttccgaatccttctttccgaggtttatgcatgacaatcagtccttttgcgggcaagccggcgccagcccagttgctggtggatatcccgcgactggttacggcctattacactggccagcctgatgcagcaatctccactcagcgcgtggcattcggtacgtccgggcaccgcggcagctcgttcgaactgagcttcaacgagtggcatgtgctcgccatcagccaggccatctgcctgtatcgcgaagcacaaggcatcgacggcccgctgtttgtcggcctggacacccatgcactgtcgacacctgccggagccagcgccctggaagtgctggccgccaacggcgtgcacgtgatgctcgccgaaggcgatgaatacacgccgaccccggccatctcccacgccatcatctgctacaaccgtggtcgcaccagcggcctggctgacggcatcgtcatcacgccatcgcacaacccgccgcagagtggcggctacaagtacaacccgcccaatggcggcccggccgacacccacgtgaccaagtggatcgaagccaaggccaacgagctgctcgccaacaaactggccggggtcaagcgcatcactcacgcgcaggcgctcaaggccgacactacccatcgccacgattacctcaacagctacgtggccgacctggtcaacgtgatcgacatggacgctatccgcagcgccgacctgcgcctgggcgttgacccgctgggcggagcaggggtgcgctactggtcggcgattgccgagcactaccgcttgaacctggacgtagtgaacaccgaagtcgacgcgactttccgcttcatgagcgtcgactgggacggccagatccgcatggacccgtcctccagctacgccatgcaaggcctgatcggcctcaaggaacggttcgacgtggccttcgcctgcgacccggaccatgaccgtcacggtatcgtcaccccgtccggcggcctgctggcgccgaacaactacctggccgtgtccatcgactacctgttccagaaccgtccggactggcgcgcagacgcggcggtgggcaagaccgtggtcagcagcggcttgatcgaccgcgtggcggcccgcatcggccgtcgcctttacgaagtgccggtcggcttcaaatggtttgccgatggcctgttcgaaggctcgctgggttttggcggcgaagaaagcgccggtgcctcgttcctgcgcaaggacggcacggtctggagtactgacaaggacggcctgatcccggcgttgctggcagcggaaatgacctcgcgcaaaggccaggacccgagccagatctaccgtggcctgaccgacgccctgggcgaaccgttcgcgattcgtgtggacgccaaggccacaccggcgcaaaaagccttgctgggcaagttgtcgcccgatcaggtgacctcgaccgagctggccggagaacgtatccagcagatcctcagccacgcgccgggcaacaaccaggcaatcggcggcttgaaggtgatgaccgaaaacggctggtttgccgcacggccatcgggcaccgaggatatctacaagatctacgccgagagctttatcggtgacgatcacctcaagcaactggtggaagaggcgcaggtgttggtggacggcgccatctccgactaacgctgcaatatcaatgtgggagggggcttgcccccgatagcggtgtgtcagtttgcatctctttttctgaaacacagccatcgggggcaagccccctcccacagttgattgaggtcaggccaggtctaccaggacgatttcgctgtcctcgatcgcggttacccgcaaaacctgttcattctctaccgcaacaccgtctcgcgcttgtgcacgcaagccattgacttcaatcacgcccgtcgccggcactagatacgcacgacgcccaccgtccagccggtactcgacagtttccccggctttcaggttcgctgccaccagtcgcgcatccgcacgaatacgcaggctttcattgtccccggccttgccactggccagtgtcacaaacccctcgcggtcgcctttcgggaacggcttggcgccccacgaaggcggcaaaccggcttcattcggaataatccagatctggaaaatcttcgtcggcgcatcttccaggttgtactcgctgtgagcgatcccggtgcccgcgctcatcacctgcacatcaccggcctcggtacggcccttgttgccaaggttgtcggcatggctgatcgcaccttcacgcacataagtgatgatctccatgtcgcggtgtgggtgctgcgggaagccagtgccgggcgcgatgatgtcgtcgttccacacccgcaggttgccccagtgcatacgcttgaggtcgtggtactcggcaaatgaaaagtggtgatgggcgtcaagccagccatggtgggcgccgcccagggaattgaatggtcgaagttcaagcatgatcgtctcctgtggatgggcctatgatcctgcagcccatgatcgataaaaagcgtaaaaaatgcctgattcctatcgatttaatggattggttagtggcgttttgactttcagttcatcgcctaactgcatgaccgcaaagcaattggctggaactgagagtcgattccggcgaccatggcgcacttgtcacaacccagctcaacgcaggagtccgcgtgtcgcaacaaaagcctgatcttcctcccgaactgcgccccttggctgaaatgccgctattgaagcgcttggccgcgcgcctgtttggccatggcctgacccgcttgcgcgcccagcatcggttttcctggttgcacgggcaggccgacggttttcgcagtgggcacgaggcgggcgtggagtacggttaccgtgaaggcaaggccgatggtatcgaggaaggccggcaggtcctgctgattcgtgacttccgccccgatgagcaccgagcgccgcgtgtggacgacagcctgttcgatgattggcgcctgccgctcactgccgagttgaagaagcgcatcaaggcggatgtcgcgcgattgctaccggcccatgcccagcccagcgcggcgcaatggaagatgattttcagcgatacaccttcaacctcggtgattgccggggctggcgcgggtaaatccacctcgctggtgctgcgtatcctgttgctgacccattacctgggctttgagctgagctccatgacggtggtgacctttacccgagagtcgcgcaaagacttcatcaacaagctcatggaaattctcaacctgtggggccaaccccttggtatgaaagaagcgcaggccgtggtgcgtacctttcattcgcgcattctgccgatggtgcgcagcctgccgggctttgaacgcctgcaagcgttcgaaaacctcaactcgggcttcgaagacgccgacagcaacccctttgacctgcgcatcaacgatgcccagcgccagcaaatgaatgcctgttatcaccacctgcatgggcggcacccacgctttcgcgagttgattgcgccgctggcacgccatggcctgcagctcaaggaactggagcgtgatcatcctgacgtgcaaaagcgcgtagcggtgaccgaactggcagccaagcgtgatgaagagctgtgtgatgtaatcgaggacctgtggtttcgcgccggtgcctggccgatcaagggcatcgagcccaatcgccagaccgtggagatcaatggcgcgcaatttcactgccatggctatatccccgaactggacgcctgggtcgtactgggcttcgactcgcgggaaaatgcccagctcagccggcccaacgcgaaactgccagtgcgcgcagaatgggcggtaaaacgcactttgtttcaagctttctgtcgtaagccattgatatggatagacagttatgaatcctcaaggcgtctgttgagtagcttggcaggggatgccactgctgggccaggcttcgattacaaggtcacaggcgagctggcttcggcgccgttgctggacagtttcgtgatggcggccgggtttatcgagaaccttgggctggatgtacccaccgcggttgggcagatgagctttgccaaggatgacccggaccgcttcttcttcgaagccctgagcattttctggaaggccctggaagatcacctgctggaccagtcgccgccgatcatgacctacaaccgcatgttctcgctgttcggcgagaacaccccggaaaacctcaagctgctcagcgacccgctgttacggccgctgtcgcacctgatgatcgacgagttccaggacgtttcgccacagatcgtctcgtggatccgtgccagcctgcgcgagatccgcagccgtggcccggccatgcacgtcgggcgcggcgcccagcattcatcactgttgtgtgtgggggatgactggcagtcgatctacggctggcgtgggagttcgtccaagtacttcatggaattcaacacggagttcccatcgcctgccaccacccgagtgatgctgggcgagaactatcgcagtcaccagtacatcatcgacgcggccgagcatatcgtgcgcgccgcacccgccatccccggcaagaaggccaaggccagcggggcgcccaaggctttggtgccggtcatggtgctggaacgggacgatgcggcattgggacggcaattgctggagcattaccagcgcggcgaatcagtgctaatgctctatcgaaaaagtagcgataaattactgattcaagagcatattcagtcaatagttaatgtggattctagcttgccgcctccggcgcgcaggctgaaacaattgacctaccacagcgccaaggggctgcaggccgatgcggtattcctgcttggggattgccagcatgtcacccgttcgccgtataaaaaccaggtgtaccgcatggcgggcctgggcaaggacggggacagcgagccgtacgacaacgcgcagaaggacgagatcttgcgcctggcgtatgtgggcatcacgcgggcggtgagtcattgctactggtacgtggaaaagcccgaaggccaggcagtcaatgtgcccaaggcgtcggagcgggtagatggcaggaaagcgttttttgatgatcagcgcttttaggcgctgatcacttcaggcccgcagggactgcggcggcacaaacgactccaactcgtcctccaccgcctcgatgatccgctccacatcggcggcattcatcaccgtggcgcaggggatgccggcgatggcgatcaacgtctcgccgctggcccggtcgaacaggcgggcgatcatgctgccgggcgcgtccatgctgccctcgaagcccatcggatggaaatgccagcgcatcagctggcaggcgttggggaacgtcactttattcatgttgcccaccttgttcattgagcgcttcctttagctcgcggcagggggccagaccttcactggtcgtggcggtgtagagcttaaaaatagcattcgttcgtcaccgcaaggtgactttttcggccccgttcggcggttgttttccataaggttgatgtgggtcatgtcctacttgggattgggcaaaaggccattagtcggaaacgtcaattggccattgaagcacccacagaaattcggcaatctccagggtttacccgccgcagagccgtccatgcccgacatcgctgcagacgatgaatgccagcaatcccacgccacgcgagagttggtgttacgccatcacctctgctggcgccaccgggacctggaaggcgtgatgtcctactaccacccggacatccaataccacgactttttccagaaccgagtcgtcggtttcgccgacttgcgcgattacctgcaagccagcatgccccgtgaggctgacgaagcgatcgagcacagcgaccgtatccgtgccgacggcgataccgcgttcatccagtaccgcatcaccttgcggggcagccagggcctggtgtcattccgcaccagcgaagccattacggtgcgcgacggactgatctggcgggtcaacgaatacgcgtccctggtgcacgagcagccggcccaggccgcacggccctctgtcagccgcctgggcctgtcgccccagcaattggggcatatggccaatgacctgcaacagtatttcgaacgcaagcaaccttacctggacccggagctggacctgcaacgggtggccaaggagtgcggctacagccgcaatcaaatttcctacctgctgaaccaggtgctggggcaaagcttctaccgctacgtcaaccaggcaaggctccagcatttactggccgcgctggatcaggccgtaccgccgatcaaggtcgatgacctggcgtttgccgccggtttcaattcgctgtcggcgttctacagcgcgttccgccagcatacgggccagtcgcccaaggcctacgtcaaacaaatttctctgcgtgcacgcgcgcaagacagcccataacacggcgctctaggatcaaccctatcgaaacgaggtaggggaacctggcatgccggcatggcgcaacatcagtttatggatggaccagttggacgacccgctgcaggcgcggccgacgctggagcatgacctggacgtcaacgtggccattatcggcgccggttacaccgggctgtggaccgcgtactacctgaaacgccaggctcctgagctgaaaatcgccatcatcgaagcgcaaacggccggtttcggtgcatctggccgtaatggcggctggctgatgggtaatctgctgggtgaggaccgcttgctcgccggcctgaatcccgaacaacgtcgcgcttcgtttgacctgctgcacgccatccccgatgaagtggcccaggtgctggcacgtgaaggcatcgactgcgactaccgcaagggcggcgccttgtactgtgccgcgcgctaccccgagcaggaaggcagcctgcgccgctatttggacaaactctacgcccaaggcctgaccgaagacgactaccgctggctcgccccgcagcagttggccgagcaaatccgcatcgccaagccctatggcggcatttacgcgccccatgtcgcaaccatcaacccggccaagctggtgcgtggcctggcgcgggtggtcgagagcatgggcgtgatgatctacgaaaacagcccggtcacccactggcaatccggcagcctgcgtaccgcaaaggccggtgtgcgggcggcctgggtggtgccggcggtggagggctatgccaccaccttgccgccgctgggtcgctaccagctgccggtgcaaagcctgatcgtcgccaccgagccgttacccgccagcacctgggatgagatcggcctgagccatggccaggcctttggtgaaagcagtcgccaggtcacctacggtcagcgttcggcggataaccgcctggtattcggcgcgcgcggcggttaccaattcgccgggaagctacgccacgacttcgatttgaccgacagcgaagtggagctgcgtcgctatctgttcggcgagctgttcccacagctcaagaacgtcaggattacccattcctggggcggcaacctgggcatgtcgcgcaatttccgtccgcacatgctctgcgaccacaagacaggcatcgcgctgtccggcggttacggcggggagggcgttggcgcgaccaacctgggcggccgcaccctggccgacctgatcctgggccgcgacacgttgttgacccatcagccctgggtcatccgcgaacgcggcctggacgcgctcaaaccctgggaacccgaaccctgccgctggctgggctacaacgcgatcattcgcagtttcgtccatgaagaccaggtactggccaaccccaataccgccccttggcgccgcaaactggcggccggtgtggccgggttcatggaaggtttcatgcactaagtcgtttcattcacacgggaaaacccatgagcatcactcagttcaaagacacgctgaacgcccacctgccggactcgtcgcccgtcgccgtgcccttgggtgagcccattgccattgcgtcgaccctgagcgtcgagcgcaacgacggcgtcgagaccggcatctgggagtgcaccccaggccgttggcgtcggcagatcaactcccaggagttctgccactttatccagggccgctgcaccttcaccccggataacggtgaagtcgtccacatacaagccggtgatgcactgatgttgccggccaacagcaccggcatctgggacatccaggagaccgtgcgcaagacctatgtattgatcctgtaacgctttgatccttgatcgcctgccataaaaacagccctaaaaccgccaggaaatcgaaccatgaaagccattgccctgttgcccttgatgttggtggcctctgtcagccaggccaccgagacggtaaaaatctacaactggtcggactacatcgcgccggataccaccaagaacttccagaaagaaaccggcatcggtttcacctacgacgtgtacgacagcaatgaaaccctcgacggcaagttgatgaccggtaaatccggctacgacgtggtgttcccgtccaaccatttcatggcccggcagatccagggcggggcattgaagaagctcgacaagagccagttgcccaattggaagaacctcaacccggtactgctcaaggccctggaaaacaacgacccgggcaatgcccatggtttcccgtacctgtggggcagcaccggcatcggctacaacatcgacaaggtcaaggccgtgctgggtgacaacgcgccggtggattcctgggacctgatcttcaagccggaaaacatggccaagctgcagaaatgcggggtggcgatcctcgacaacggcccggaactgctgccggccgcgctcaactacctgggcttgccgcaccacagcaagaaacccgaggactacaagaaggctgaagacctgctgatgaaagtgcgaccttacgtggcgtacttccactcctcgaaatacaccgccgacctggccaacggtgatatctgcgtggccgttggcttctccggcgacatcctgcaagccgaaagccgcgccaaagaggccaagaacggcgtgaacatcggctacaacatccccaaggaaggcgccgccatctggttcgacatggtcgccatgcccgccgatgcaccggatgaaaaagccggctacgcgttcatgaactacctgctgcgtccggacgtgatggccagcatcaccaactacgtgcactacgccaatggcaaccaggccgccgacagcctggtggacccggcgatcaaggccgataccaaggtgtacccaagcccggcaatgatgggcaaattgtttgcgctggaagcgatgccactgaatatcgaccgtgtgcgtacgcgggtgtggaacaccgtccgtaccggccgctgaaattccgtggtgagcgggcttgtcccgcgctgggctgcgaagcggccctaattccagcacccggtaggtgtggcaggccgcctatggacccgtccttcactgcaggcgcggtccatagagtttctagcgattaaaaccgatttcttagactgtcatttctgacaggttttatgtttggacaaatgacttaagctcctgatgcctactagtcatcaaatggaaaaaggagtttttatgccaaacgtccctgatatcgtcctgccgaaaatctacccgttcggtagcatggtgggtgcggtaaccactggcggtgtgccgagtattttcatagcgacatcggtctatcgcgacgaacaaggtggaaatattcgatttattggccgaatggaaggttcagatccgctagcgccagcaatcatccaagtcgagattaaggatcgtgacacgccaagcggtacttacacattagcggacaaagtcttgagggttatttacgtcccgcatggctcgactgcgggccgccttgcagtcagtgccgaggtgctgtttattcgctccggtccgattgactggattcgaggacgtgtggaggctgaaaccccgcagggtgatgtgatagacgttgtgtactctatcttcggaatgggttgaaaggcttgaaaccgacagggcggttttctgaagtcgacttcagatcgccgctctttaccgggtagtgatatccgcattcacggattctccagatcatgccccaacgactggataaacaacgaaaacagctccggctgtgacgagatatccagcttggcgtacaagtgtcgacggtgcaccttcaccgtgtccggcgagatgttcaggcgttcggccatggccttggacgagaacccgcgcagcaccaggcgagcgatttccagttcgcggtccgagagcacaccacagccgaattgactcagcgcgtcccggatctggctacccatcgccggcgtacgctgggtactctgctgccagtgctgctgcatcagcggcaacacccaggctgccaccgtggtcatcaacccggtctcctcaaagctgaagcgccgctgcatgcccagcgacagcgacagcgtgcccgcgcccggcagttgcaggatgaattgcacctcgtcttccagaacgttgtcatggaagtaattgaggaagtactcactctggcgaaaatgatccggcgccacttcctccaggcggtacaccccgctggcatacccctcgcgacaggcctggaagaacgggtcgagcaaatacaagccgttgaggtacaccagcatcgacgccggcttgctgctgggctgggcgtcgtattcttccagggcctggggtggcccttccaaggggtagaagatcgccagggcgttatcgaagggcaggcattggtgcagcaacagcaccaactgcttccagaaacgctcggtgccgatgtgctcaacggtgcggcccaggccggcgtgcatcccaacctcgcgaaacaggctcatgtgacaggctcccgccggcaaaaagatcggccaagggttcggcttttgccgggtggcgtcaaggggagtacgccaataggggaattggccgacatgccctcacgtattaacgtccgcatcattcagcgggaaacatatcccgtgacttatcagatttttcgtttctgcctcataccaagaacaacgacagaggataacgatatgagcacttcccccacgcccgaaggcgtgctgaaacccaccttgagtgtgttcgatgtggtcgccattaccgtatcagcggtgacgccggccagttccgtgtttgtgatcgcaccgtttgccatccagcaggccggcagcggagtgttcctggcgttcgtgatggccggtctgctcgcgctgatgtttgcgttttgctacgccgaactgggccgtgctcacaacagcgccggtggcgaatatgtatacgccaagcgcgtgttcggcggcatggcgggctacgcgacattcctgaccgtgctggtgatgttgctgtttatcccgccggtactggctacgggcgcggcaacgtatctgaataacgccctgggcacgaagtttgattcgcagacggtggccctggtgatcgtggtgtgcagctacgccctgggcatcctcaatatcaagctcaacgcctggatcaccggcacctgcctgttgctggaagtcgcagcgctgctggtgatcgtggtgatcggcttcggcaacccggtgcaaccggccagcgtgctgttccagccgcagatcgtcgaaaacggcgtgttgcacctggcgccttgggccctggtgatcggcgcggtgggcatcggcctgttttcctacaacggctacggcccggcggtgttgctcgccgaagacatgaaatgcggcggcaaaggcgtgcacaaggcggtgttgtggtcgctggggttggtggtgatcatcgagttggtgccgatcatcgccctgttgatcggcgcgccgtccctgagcgcgatgatcagcagcccggaccccatcggctacctgctgaccagccatggcaatgaaaccctgtcgcgcctggtcagcgccgggatcttcctgtcggtgttcaacgccattgtcgccatcgtgatccagatcggccgcgtggtgttcagcagcgggcgcgatgcgctgtggacgccgggcatcaacaagctgttcacgcgcattcacccgcgctgggattcgccgtggttggctacgctgttcctggcgatcccatcggcgctgctgagtttcagctccaacctggccgacctgacgtcgttcagcgtattgctgatcatgctggtgtacctggtggtggcgttgagcgcgttgatgagccgggtgctgctgcgtgatcgcgagcatccctatcgcatgccgctgtggccgttgccggcgttggtggcggtgctgggcgcgggctatttgttaatgaccttgatcgtggcggcctcggtccgcgacatcctgatcatcctcggcctgctggccctgtcggtgatcctgtattgcatcagtggccggttgagtccggtcttccagaaattgtaaggagtagttatgcgcgcacgtcaattgggcatcacgttggggctgggcacgcccggtgagtggaacgccatcactgatgtgccgggggtacgggtcgggcacagcacgctcaagacccgtatcgatggcaagcaggtgcgcaccggcgtcagcgtgatccagccgcgcgcgggggaggctcgcctgcaaccgtgctttgccgggtaccacgtgctcaatggcaacggtgacgccaccggcctggaatgggtcagcgaagcggggctgctgaccacgccgctggccatcaccaacacccacagcatcggcatcgtgcgcgacagcctgatcgccctggaacgcgaacgcctggcggacccggcggtgtattggtgcatgccggtggtgatggaaacctatgacggcctgctcaacgatatctggggccagcacgtggggcccgagcatgtgcgcgaagcggtggacaacgccgaaaccggcccggtgcaggagggcgcggtcggcggaggcaccggcatgatctgccacgagttcaagggcggcatcggtacatcctcgcggcgcctgccggcggagcagggcggctggaccgttggcgtgctggtgcaggccaaccacggcaagcgccaggaactgcgggtggacggctacccggtggggcgccgcctgatggacattgcgtcgccgttcgcagagcaaggtacgccgggcatgggttcgattgtggtgatcatcgccacggacgcgccgttgctgccgcaccagtgccagcgcctggcacaacgtgcatccatcggcatcgcccgcaccggcggcggcaccgaggactccagcggcgatctgttcctggcgtttgccacgggtaaccaggatttgccgccggcggattacgggcgcaagggcctgccgttcagcagtgcattgcagatggtcaacaacgaccatatttcgccgctgttcagcgcggcggcggaggccgttgaggaggcaatcatcaatgcgatgctggccggggaggacatgctcaccgatcaaggtgcgcgcgtgccgggcctggacgccgacacgctgttggcggcattgcacaacaccggctggagtgtgtcccggaaataggggacacactaacttattactataaatagtggctgtttaatgttgccaatggcaccgtggcaatatattggatccattaatagcgaatgccgctcaacttgagcggcattagtgctatttaatatttaaataccgttgcggtgttttttgtcggacaacagcggtactccccaataaacagggagcggaacttacacggagtgtttgcctggggttttttagtgctggaaaagatgtagacgaaagatttcaagttgtgtcagttttcttacgccttcaaaagaggcgagtgataggacgatctcgcccgcggggttcctatcgatcaaagactgatgcacttgcaaacaaggaagtacgtttatgtcaaaagtaaaagacaaggctatcgtgtcggcggcgcaagccagcaccgcttactcgcaaatcgataccttcagccatctgtatgaccgtggcggcaacctcacgatcaatggcaaaccctcctataccgttgaccaggcggccacccagctgctgcgcgacggcgccgcgtaccgggactttgacggcaacggcaagatcgacctgacctacaccttcctgacctcggcctcctcgagcaccatgaacaaacatggcatcgcaggcttcagccagttcaatgcccagcagaaagcacaggccgtactggccatgcaatcctgggcggacgtggccaacgtcaccttcaccgagaaagccaccggcggtgatggccacatgaccttcggcaactacagcagcggccaggacggcgcggcagccttcgcctacctgcccggcactggcgcaggctacgacggcacctcgtggtacttgaccaacaacagctacacgccgaacaagaccccggacctgaacaactacggccggcagacccttactcacgaaatcggccacaccctgggcctggcccaccccggcgactacaacgccgggaacggcaacccgacctacaacgacgcgacctatggacaggacacgcgcggctacagcctgatgagctactggagcgagagcaacaccaaccagaacttcagcaagggtggggtcgaggcgtacgcgtctgctccactgatcgacgacatcgcggcgatccagaagctttacggcgccaactacaacacccgtgccggcgacaccacctacggcttcaactccaacaccgggcgtgacttctacagcgccacctccaatgccgacaagctggtgttctcggtgtgggacggcggtggcaacgacaccctggacttctccggttttacccaaaaccagaagatcaacctcaatgaagcctcgttctccgacgtgggcggcctggtgggcaacgtgtccatcgccaagggcgtgaccgtcgagaacgccttcggtggcgccggcaacgatttgatcatcggcaataacgcggccaacgtgatcaagggcggtgccggcaacgacatcatctacggcggcggcggggcagaccagctgtggggcggcgcgggcaacgacacctttgtgttcggtgccagctccgattccaagccgggcgcggcggacaagatctttgactttacctccggttccgacaagatcgacctgtctggtatcaccaagggcgcaggcctgaccttcgtcaatgcctttaccgggcatgccggcgatgcggtcctcacctacgccgcaggtaccaacctgggcactctggcagtggacttctccgggcacggcgtggcggacttcctcgtcaccaccgtcggccaggctgcggtcagcgacatcgtggcgtgatgcacgggcgcggcgcttcggcgccgcgccttacggatggagcatgaagatgcggcgtatgtttaatctgatcgcctgcgtgctgcaggtgatgttcgtgtcggcaggagcccacgcaatggcaagcagtctcgtattacctacctccgcccagttggccgggcattggcagttgcaccagcaggaccaggtctgcgcgctggacttgctggaacaggccaatgccttgggcggcgatgtggcgtgtgtcgccaactggttgggcgacaagcccctgacctggacgccaacgccggatggtatctggctgatgaatgccgaaggcagtggcattactcacctcaaccggcagaaagaaggtgaatataaaggccgcacgccgacgggcctcgaagttgtactgcaacgcgcaccttagttgccgttataagtaaataacttgatttcattagttgaccgctccgttagccggggctggggcaactattgcgcgcaattgggttcagggaagatcagaagctatggcgaagtcccatgccgtcgcgccgttattcaaggcgctgggtgagtacaagagtattttgatcagcattggctgtttcacggcattgattaacctgctgatgctggtgccgtcgatttatatgctgcaagtgtatgaccgcgtgctgtcctcccagaatgaaaccaccctggtgatgctgacgctgatggtcgtgggcttctttgcctttatcggcctgctggaggtgatccgcagttttatcgtgatccgcatcggcagccaactggagcggcgtttcaacttgcgcgtgtacaaggcggcgtttgaacgcaacctgcaacgcggccaggggcacgccgggcaatccctgggggatttgacccatatccgccaattcatcacggggccggcgctgttcgcattttttgatgcgccgtggtttcccatctacctgtttgtgatttttttgttcaacgtctggttgggtgtgcttgctacggtcggcgccgtgctgctgatcggcctggcatgcctgaatgaatacctgaccaaaaagccgttgggcgaagccagcggctactcccagcaatccacgcaactggccaccagccacttgcacaatgccgagaccatccaggccatgggcatgctcggcgcactgcgcactcgctggttcgcgctgcattctcagtttctcggcttgcagaacaaggccagtgacaccggttcggtgatcacctccctgagcaaatccctgcgcctgtgcctgcaatcattggtgctcggcctgggggccttgctggtgatcaagggcgatatgactgccgggatgatgatcgccggctccatcctgatgggccgggtgctcagccccatcgaccagttgattgcggtgtggaagcaatggagtgcggccaagctggcctatcagcgcctggacgacttgttgcgcgagtttcccccggaggtcgagcagatgaagctgccggcgcccaagggccaggtcagctttgaacaggtcagcgccggcccgcccggacggcgtatggcgaccttgcatcaggtcagcttcaacctcggcgccggcgaagtgctcggtgtgctcggggcatcgggctccggcaaatccaccctggcccgggtgctggtgggcgtatggccgacactcgctggcacggtgcgcctggatggcgccgacatccatcgctgggaccgcgacgacctcggcccgcacatcggctacctgccccaggacatcgagctgttcagcggtagcatcgctgacaacatcgcacgctttcgcgaagccgaccccgagcaggtggtgcgtgccgcgcagcaggccggtgtgcatgaactgatcctgcgtttaccccagggctacgacacggtgcttggggacaacggcggcggcctgtccggcggccagaagcaacgggtggccctggcccgcgccctgtacggcgggccgcgcctgatcgtgctggatgagcccaactccaacctcgacaccgtgggcgaagccgccctggccagcgccatcgtgcagatgaaagcccagggcagcagcgtggtgctggtgacccatcgttcgtcggcgctggcccaggccgacaagttgctggtgctcagcgacggtcatttgcaagcgttcgggccgagccaggaggtgctgcgcgcattgtcgggccagccggaaacgcccaaggacaaaccgggcgtgagtttcagtcgtcagtaccaggccacaaggaatccaggcgcatgagcagcatcacggttgaaccacgcttcaaagagcacgacgccaggtttttcgcgcgcatggggtggttgctgaccgtggtcggcgccggcgggtttttcctgtgggccagcctcgcgcccttggaccagggcatcccggtacagggtacggtggtggtgtcgggcaagcgcaaggccgtacaaaccctcagcccgggcgtcgtcagccggattctggtaaaggagggcgagcatgtgaaacaaggccaggcgctgttccgtctcgaccagacccagcaccaggccgacgtgcaatccctgcaagcccagtaccgcatggcctgggccagcgtggcgcgctggcagagcgagcgcgacaacctcgccagcatcgcatttcccaccgaactcagtgccgctcccgaccccgccctggcgttggtgctggaaggccagcgccaattgttcagcagccgtcgcgaagcctttgcccgcgagcaggccggcattcgcgccaatatcgagggcgcgaccgcacaactgggcggtatgcgccgtgcgcgcactgacctgaccgcccaggcgcaatccctgcgtgaccaactgagcaacctgcaacccctggccgacaacggctacatcccgcgcaaccggctgatggagtaccagcggcagttgtcccaggtgcaacaggacttggcgcagaacactggcgaaagtggccgtgtggaacagggcattctcgaatcgcgcctcaagctgcaacaacacagtgaggaatatcaaaaagaggtacgcagccagctggccgatgcgcaactgcgcagcctgaccctggaacagcaactcacttcggccgggttcgacctgcaacacagcgaaatcaacgccccggcggatggcatcgcggtcaatctcagcgtgcacaccgaaggcgcagtggtccgcgccggtgaaaccctgctggaagtcgtgccccagggcacgcgcctggaagtggaagggcacctgccggtgcacctggtggacaaggttggcacgcacctgccggtggacatcctgttcaccgccttcaaccaaagccgtacgccccgggtgccgggcgaggtcagcctgatttccgccgaccagatgctcgatgaaaagaccggcgcgccttattacgtgctacgcaccacggtcagcgaagcggccttggaaaaactccacggcctggtgatcaagccgggcatgcccgccgagatgttcgtgcgcaccggcgagcgttcgttgctcaattacctgttcaagccgctgctcgaccgcgccggctcggcgttgaccgaggaatgaacatgaaaccggtgtttatggccttgctgttcacctgcgcgagtgcccaggcggccatggggccgttcgatgtgtacgagcaggccctgcgtaacgatccggtgtttctcggcgcgatcaaggagcgcgacgccggcctggaaaaccgcgccatcggccgcgccggcctgctgcccaagctgtcgtacaactacaacaaaggccgtaacaactcccaggccaccttgccggacgggcgcggtggcaactaccacgacgaccgcaactacaacagctacggctccaccttcagcctgcaacagccgctgttcgactacgaggcctacgccaattaccgcaagggcgtggcccaggcgttgtttgccgatgaaagctttcgtgacaagagtcaggcgttgctggtgcgggtgctgacctactacacccaggccttgttcgcccaggaccagatcgacatcgcccgcgccaagaagaaggccttcgagcaacagttccagcagaaccggcacttgttccaacagggcgagggcactcgcacggacattctggaagccgaatcgcgctacgagctggccaccgccgaagagatccaggcgctggatgaacaggacgcgtccttgcgcgagctgggcgccttgatcggcgtacagagcgtcgacatccacgacctggcgccactgaaccaaggttttgccgcgttcaccctgaccccggccaactacgacacctggcatgagctggcgatcagcaacaaccccacgctggcctcccagcgccaagccctggaagtggcgcgttatgaggtagaacgcaaccgcgccgggcatctgcccaaggtcacggcctatgccagttcgcgtcaacaggagtccgacagcggcaacacctacaaccagcgctacgacaccaacaccatcggcgtcgaagtcagcctgccgctgtatgccggtggcggcatctcggcctctacccgccaggccagccgcgccatggagcaggccgagtacgagcttgagggcaagacccgcgaaaccctgatcgaactgcgccgccagttcagcgcctgcctgtcgggggtgagcaaattgcgcgcgtaccagaaggccctggtgtcggctgaggcgctggtggtgtcgaccaggcaaagcatcctcggtggcgagcgggtcaacctcgacgcattgaacgccgagcagcagctctacagcacccggcgcgatctggcccaggcgcggtatgactacctgatggcctggaccaagttgcattactacgcgggcaatctgcgcgataccgatttggccaaagtggatgaggcgttcggccctgcaaggggtgtaaatcaataataagaggggtaataccatgggtatctttgactacaaaaacctcggcaccgagggttccaaggcgttgttcgccgatgcgatggcgatcacgttgtacagctatcacaacctggataacggctttgccgtggggtaccagcacaatggcctggggctgggcttgccggcaacattggtcggcgcgttgctcggcagcaccgattcacagggcgttatccccggcattccgtggaacccggattcggaaaaagccgccctggaagcagtgcaaaaggccggttggacgccgctcagcgccagtgccctgggctacggcggcaaggtcgatgcgcgaggtaccttcttcggcgaaaaggccggctacaccacggcccaggtcgaggtgctgggcaagtacgatgatgccggcaagctgctggaaatcggcattggctttcgcggcacctccggaccacgggaaaccctgatcagcgattctatcggcgatctggtcagcgacttgctcgcggccctggggcccaaggactatgcgaagaactacgccggcgaagccttcggtggtttgctcaaaaatgtcgccgactacgccagcgcccatggcctgagcggcaaggatgtggtggtcagtgggcatagcctgggtgggttggcggtcaacagcatggccgacctgagcaacagtaaatggtccggcttctacaaggacgccaactacgtggcctatgcctcgccgacccagagtgccggcgacaaggtgctcaatatcggctacgaaaacgacccagtgttccgggccctggatggctcgtccttcaacctgtcgtccctgggcgtgcacgacacaccccatgcgtcgactaccgacaacatcgtcagcttcaacgaccactatgcgtcgacgctgtggaatgtgatgccgttttccatcgtcaacctgccgacctggatctcgcacctgcccaccggctatggcgatggcatgacgcgcatcctggagtcgggcttctacgagcagatgacccgcgattccacggtgatcgtggccaacctgtccgacccggcacgggccaacacctgggtgcaggacctcaaccgcaatgccgagccgcacaaaggcgataccttcatcatcggcagcgacggcaatgacctgatccagggcggcaagggcgtggactttatcgaggggggcaagggtaatgacaccattcgcgacaacagtgggcacaacaccttcctgttcagcggcaacttcggtaacgatcgggtgatcggctatcagcccacggacaagttggtgttcaaggatgtggcaggcagcgccgacttgcgtgaccatgcaaaagtggtcggcgcggatacggtgctcacctttggcgccgactcagtgaccttggtcggcatcgggcaaggcggcctctgggcggacggtgtgagtatcgggtgaatgatgcttatggcgttcagccagccaatcccccaggaaggcctggggtatcggctgaatgcagcggcgtggaaaatccttcggtaaataaatatctacctggttgtcgcgacggatcgctcggtgtgcctgcgtttaacgatcaagcgagccgtttcgcgtgatgacgtgggaggaaccgagcatgtgccgattgcgattgttgctgtgcgccctggtactgctggggttggctgggtgtgcggtgtacccggcgtattcgggcccgtgctgctatcacccgtactaccactcgtactattaccatccctactatcacccgtattaccacccgtattaccggtattgaccgggcgacaatgcaaaaaaagccccgcactgcggggcttttcattgttatttttctttgatcaccgtcgcgacatcggcagccttgacccgtacccgcttaccggcgatgtcggtgaattcgtagaagccatcggcggtcttggcgtttggggtgtccttggtcaaatactgcgtgccattttgcagtgtcactacggtttgcgtcgcgcaaccggccaataccagaaaagtgagtgcaaccagcggcagacccaaattcttcatgttcataacccttaccttgactttgaaaagtcccgcgccagaggcggcgggcgacaaatgttacgccatcgattctcccatctgatcgcttttatacaaaaagttgcaggcgccatttatctattaccgattgcaacaccgcatttggagcggcactctgtatgcataaccagtattcgatcagcgcgtgaaatggccaatcccctcgacgatcccctgtattacctgcataacttccgccaagtgctgctctggctggggcagcgctatgccgatttgctcgacccggacgaacagcgttttattcagcaatttgacaggttgccgcaggcgtcccaggcgcttttggtgcgcatggtgatgcgcaagggcgtgcactttcgtgcgggcaagctcaattacctggagattggttgcccccacgccgctgccgggccgctgatggaactgggttgggtggacgatcagtacctgctggcctttgaagagctgttcgccgtgctgcaaaaaggtgaaatcctggccactttcaaaccctggatcgagcagcccaaaggcaagaaaaccgattggctggaagggttgtcggcacaattcaccgacagccgcagctttgccacctggtgccccgacctggccgacaggttgttcagcctcaccgtgatggaactctgcgaccgtctgcgcctgatgttcttcggcaacctgcatcaggactggtccgagttcgtgttggctgacctgggcatctacacctatgaaaaagtccagttctgcgccgaatcccgtggtttgcgccaccgtgacgatgtgcaggggtatctgttcctgcaccaatgccagcaggcgtacgaggccggtgagccgctggaagatgtactggccggggttgccacgctggacaccgataacccctggctggagaaacgccgcgccaagttgttgtttcagatgggtcaatattgcgagcgtactgccgagctggccctggcggagcggatttaccggaactgcacctaccccggtgcccgctcacggttgatccgcgtgctcgagcgccaggaggattacgcccacgccatggccctggcgaacaccgcccaacaggcgccggaaagcgccgccgaacagcagcacttgctgcgcgtcatcccgcgcctgcgccgcaaactcggcgagccggcattgcccaaggtcaagccacgaccgttgacgcgcctggacctggccctcacgctgccggaacccttgatgtcggtggagtactgcgtgcaggcgcacctcagcgagccggatgggccggtgcactacgtggaaaacggcctgatcaattcgctgttcggcctgctgtgctgggaggtgatttttgcgccgctgccgggttcgttcttccacccgttccagcgcggccctgccgacctgcacagcgcggattttcaccagcgccgagcgccgctgttcgacgcgtgtttcgagcagctgcaggacgagcgctacaaaaccactatccgccaacgctaccgcgacaaatggggcatccagtcgcccttcgtgttctggaacctgctcagcgaagagctgctggagcaggcgctggcctgtttgcccgccgagcacctgcgctactggttcgagcggctgctgctggacatccgcgccaaccgcgccggcatgcccgacctgatccagttctggcccgcgcaaaagacctaccgcatgatcgaggtgaaaggccccggcgatcgcctgcaagacaaccagctgcgctggctggagttctgcggcgagtaccagatgccggtgacggtctgctatgtgcgctgggcaccacccgcttgagctacaccgtggcggtgcgggcgctgtgcgaattcacggccaaggtcggtgacctcgacctgcgcttcacgccgtcgccgagcgcccaggagggcatcgccggccaccgcaccgtggcctcgcggcgcagccagcactaccagaatgaagtggcgctggagggtcaataccagcagctcacggtgcggggcagggcggatggctatgacccggacgccaatcgcctggaagaagtgaagacctatcgtggtgacctcgatgcgcagcccgccaaccatcggcaattgcactgggctcaggtcaaggtgtatggctggttgatgtgccagaaactcgggctcccggacatcgacctggcgctggtgtacttcgatatcgtcggtgagggcgagacgctgctcaatcaacgcttcgacgccagcgacctggaagcgttcttcaaccagcaatgcgcgctgttcctcggctgggccgagcaggaaatgcggcaccgtgaagcgcgcaacgccgccgcgcaaaccctggcgttcccccatgcggattttcgccctggccagcgttcactggccgagtcggtgtacaaggcggtcagcaccggccgctgcctgatggcccaggcaccgaccggcatcggcaagaccatcggcacgattttcccgttgctcaaggccctggcgccccagcaactggacacgctgttcttcctcaccgccaagacccccggccgcaaactcgccctggacgccgcccaagtgttgtatgccagccgccctggcttgccactgcgcgtgctggaactggtggcgcgggacaaagcctgcgagcacctggacaaagcctgtcacggcgagtcctgcccgttggccaaggacttctacgaccgcttgcccgccgcgcgcatcgccgcgtccagggtgcgcctgctcgatcagcgcaacctgcgtgacgtggccctggcccatcaggtctgtccgtactacctgagccaggaaatggcgcgctgggccgacctggtggtcgccgactacaactactactttgactttggcgccatgctgttcagcctggcccagctcaaccaatggcgcgcggcggtgctggtggacgaggcgcacaacctggtcgaacgggcgcgttcgatgtacagcgccagcctcgaccagtaccacctcaagaccctgcgtgacagcgccccggagccgttgaagaaacccttgcagcgcctcaaccgtgagtggaacgcgctgcacaaggaccagctcgcgccgtaccaggcctacgccgtccgcccggacaaactgctgcaggccctgagcctgtgcgccagcgccatgggcgaatacttcaacgagcatccggagtccctcagcggcgacctgcaaaccttctatttcgacgtgctgcaatttgccaaggtggcggagctgttcaacgagcacttcattttcgacatcagcaagcgccagctcagcggcaaacgcagcagttccacgctgtgcctgcgcaatgtggtgcccgccgaattcatccgcccacgattgacggctgcccgcagcagcgtgctgttttccgcgaccctgagcccccggcattactacgccgacctgctgggcctgccggccgacaccgcatgggtcgacgtggaatcaccgttcaaggccgagcaattgcaggtgcgcatcgtcgatgaaatctccacgcgcttcgtgcatcgccacgcttcgctggagcctatcgtcgagctgattgcgcaccagtacacgcaacaaccgggcaactacctggcgtttttctcaagcttcgattacctgcaacaggtcgcgcagctgctggccgagcgacatccgcagatcgtgctgtggcagcagtcacgcggcatggccgaggccgagcgccaggcgttcctcgaccagttcaccgagcacagccagggcatcggttttgccgtgctgggcggcgcttttggcgagggcatcgatctgccgggggcacgcttgatcggtgcgttcattgccaccctcgggttgccgcaactgaacccggtgaatgaacagatgaaactgcgcatgggtgcgatcttcggcgcgggctacgactacacctacctgtatcccggcctgcagaaggtggtgcaggcggcgggccgggtgatccgcagccagcaggaccggggcgtggtgatgctgatcgatgaccgtttcggagaaggccgggtacgccagttgttgccgcgctggtgggcgctggcgtgagttattcctgctatcaatgatgctggcgccgtggccggcaatcgcgcacgctggcaaaaacctggaagaaggcgatgcccatgagccagcagatcatcagcgtcaacggtattgagttgagtgtccacattgtcggccctgagcagggcacgccgatctggctgctgcacggtttcccggagtgctggcactcctggcgcgagcagattcccgcgctggcggcggcgggctatcgggtatttgccccgcaaatgcgtggctacggccattccagcgcaccggccgaggtggctgattacgacgtgctgacgctatgcggcgatatccagcaggccatggaccactttggtcattcccaggtggtgatggtcggccacgactggggcgcggtggtggcctggcacctggcgttgctcgaacctgaacgggtcacgcgcctgatcacgatgtcggtgccgttcgccgggcgagcgcggcggccggtgatagaaatcatgcgtgagctgtacgccgaccgtttcaactacatcctgtatttccaggaacccggcgttgccgagcaggaattgaacgccgatatcgaacgcacattgcggctgttcatgcaggatcaggatgtgtttttgcaacgcaaaccggcgaatgccaggttgcttgaaggcgttccagcacccggcgcgttgccacactggtgctcccaggcagacctcgacgtctacgtgcaaaccttcgccgagcaggggtttcgcggcccgttgaactggtaccgcaacttcgagcgcaattggcaacgcacggaacacctggcgggcaagcaggtgctgcaacccacgttgttcctgatcggcgaccgcgacccggtcggggtattcgaggcgcatacgctcaagcgtatgccggactcagtacctcagcttgagcagcacgtgctgcccaactgcggccactggatccagaacgagcaggggcaacaggtcaacgcgctgatgctcgggtttctaggcaaaacgtaaaggtcgcacctcggccggggcggtccaccaggctgatgctgcgcccgtgcagttgcaggatgcggtgcacgatgcgcaggcccaaccccccgtcgcgccgggcgccaccaatggtgaatgcgcgcaggaacaagccttcgcgtaattcagcgtcgatgccaggcccgctgtcgctgaccgtgaccgctaccgcgtgtgcttgaggcgacaggatgacctcgatttcgccattcaccggtgtgtgccgcagggcattgtccaacaggttggtcagcacccgttcgatcaaccccaggtctgcctgcaccgtcggcacctgcggcggcaggctcgccgtcagcgtgatgccgcgtgcttcggcggtgagttcgaatttctggaagatgtcctgcaccaggtcgggcaatgaaaaaccttcgatcactggctgcacaaagccatgctccaggcgtaccagttccagcagcgattgggccaggccgccgactttgcgactctggtccaaagcaatccctaggtagcgacggcgctcttccgggctgaggctggcgtccttgagcgagagggtttccagatagccatgcaaagaggccagcggtgtgcgcaggtcatgggagatattggcgaccatttcccggcgttcctggtcctgatgggtgatggcgcgccattgttcgcccaggcggttctccatttgcatgaaggcctggtccagcaccgcaatctcatcgccgctggtgagtggcggtgcggtggtttctgccggtttgggcgcgccattgatgtcgaactggccaaccttgtcggtgagttgacgcagcggccgggtgatccaggcaaacgcgatcaggccggccatcaggcagagcagggcgaccaggccgatggaccacagggcaatcttcaaggccatgcccgtggcgtccttggcgtcgtattcatcgtgggcttctccgagcagcaccacatacaggaatccggtctgcttaccgccggccatgaggggcgcggcgctgaataccttgcgcccatcgacgctgcgcgggtcgtccccgaggatcggcagcatgaagcccgccaggaagcgccggatgggcgccaggtcgaccttgtcacgcagcaggtggccgctgggcgcggcattgccgaccacacggccatcgatgtcgagcaggtacacctcgacgctggggttgaccagcatcaactggctgaacaggttgcgcacggcgtcgggcttgaggccatcagcgtccatcagttgggtgtcgcgggcgatatgcgccgcgagatcgcgggacaggccttgcaccacttccagctcgtgcatgtggttggaacgcacctgcagccacgccgacgtgccgctgcagatcaacagcaaaaccgcgaacaccagcgacaggcgctgggtgagggtgagcttcatggcgggctctcggcaaacttgtagccacggccccacaccgtgaggatgcgcgccgggttggccgggtcggcttcgaccttggcccgcaggcggttgatgtgggtgttgaccgtgtgttcatagccttcgtggctgtagccccacaccgcgttgagcaagtccatgcgcgagaacactttgcccggctggcgcgcaaagaagtacagcaggtcgaattcccgtggggtgaggtccaggcgctggccttgcagggtggcatcgcgggtcagcgggttgatgaacaattggccaaggtcgaggctgccggcgtccatcttcaggttacgcgccatggcgtcgacccggcgcagtaacgccttcacgcgggcgaccagttccggcatggaaaacggcttggccaggtaatcatccgcgcccagctccaggccgaggatgcggtgcagttcgctggagcgtgcgctggtgatgatgatcggggtgtagcgcgtcatggcgcgggcgcggcgacagatctccagaccgtcgacgccgggcagcatcaggtcgaggatcagcgcatcccagccgccttgctccagcaggcgcaggccttcgttgccatcggtgctgtgcaccacctcgaactgttcgtcacgcaggtgcaggcagatcaggtcggcgatatgggcatcgtcctcgaccaccaggacacgtttgggctgatccatgtaagagaaaccttcgcttgtagttcgcgcattgtgcggcttttgcaacagtgtagttatcacgaattgtttaactctgcgtgaggattccgcgaccgtaaacagcccaagattccctcacttcaaagagggaaagcaccatgtactcacgccgacaaatactcctggccagtggcggcctgggtgtcgccgtcctggcgggcggcctgctcaagcaactcagtatggtcaccgaagccgaagccgccgaaaccttcgaggtcagccacaccgacgcgcaatggcacagcctgctcaccgacgagcaatacgccatcctgcgcgaggagggcaccgaacgcccctacagcagcgcgctcaacgatgaacaccgcgccggcaccttcgcctgtgccggttgcgcgctgccgctgtttgcctcgaccaccaagttcaacagccacaccggctggccgagtttctggcagccactggacaacgcggtggccagccataccgatacgtcctacggcgtggtgcgcaaggaaatccactgccgccgctgtggcggccaccaggggcacgtgttcgatgacggcccgccacccaccggcctgcgctactgcatgaacggcgccgccatgacgttcacggcggcgtaagccgatgtctatttcttataagggtccatcccatgtggcttctggttctcgcgtacctgggcggcgtgctgacaatcgtcagtccgtgcatcctgcctgttctgccttttgtcttcgctcgcaccgggcagccgtttttgcgcagtggcttgccgctgttagcggggatggcggtgacattcgccctggtggcctcgctggcggcggtgggcggcggctgggtggtgcaagtcaatcaatacgggcgctggctcgcgttgctgtgcgttgccctgttcggactcacgttgttgttgccgcaactctcggagcgcctgacgcgcccactggtagccgccggcagtcgtttgtcggaagccgccggggccgatgccaggccgcgtccgggcgcgtcgttcctgatcggcgtggccaccgggctgctgtgggcgccgtgcgccgggccgatcctggggctggtgctcaccggtgccgcgctgcagggcgccagcatcggtactaccttgctcttgctggcttacgccgccggtgctgccacctccctcgcgctggcgttgctggtcggcggtaaagtctttggtttcatgaaaaagtccctcggtgccggcgaatggctgcgccgtggcctgggcgcgctgatgctggccggtgtggccgcgattgcgctgggcctggacacaggcgtgctgtcgcggctgtcgaccgcgtccaccggtggcctggaacaaagcctggtggatcgcctcagcgccaagccggcgcagcccggcggtgcgatgatgatggccgccaatcacagcgacaccttgccgatcgaaggcgcgctgccatccctcgatggcgccgtgcaatggctcaacagcccgccactgaccgccgaagcactcaagggcaaggtggtgctggtggatttctggacctactcctgcatcaattgcctgcgcactctgccgtatgtaaaggcctgggccgaaaaataccgcgaccagggcctggtggtgatcggcgtgcatgcgccggaattcgcctttgagcgcgacgtgaacaacgtcacccaggccatgaaggacctgggcatcacttacccggtggccatcgacaacaactacaagatctggcgcgcgttcaacaaccagtactggccggcgcattattttgccgacgccaagggccagattcgttatcaccacttcggtgaaggcgactacgccgagtcggagcgagtgatccagcagttgctgcgtgaagccggcgcgaagaacgtcgcgggcggtttgatcgaggccgatgccaagggcgtgcaagaagcgccggacatgaacgaggtgcagtcgccggaaacctacctgggttcgcagcgcgccgaaaacttcgtcaagtccggccccctggcactcaataattggaccctgcaaggccaatggaacgtcggcggccagcaagccaccctcgaccaggccggtgggcgcatcgtctaccgcttccatgcccgcgacctgcacctggtgctcgccccgggcgccgacggcaaaccggtgcgtttcaaggtcacgctcgacggccaggcgcctggcgatgcccatggcaccgacgtcacgccggatggcagcggcaccgtcaccgaacaacggttgtaccaactggtgcgtcaaccgggtgccgtgcaagaccgcaccttcaccattgaattccttgaccccaacgtgtcggcgtatgccttcacctttggttaacccggagtgcctgccatgaatgtattcaaatacctgcccgtgttggccttcgccgcgttcgtcggccaaagccaggccttttccttcggcgccgccgccgacgccgtagtgatcgcgccacccgccctggacctgcccgccgaagccggcaacctgcaaaccgctgtgttcgccgggggctgtttctggggtgtgcaaggggtgttccagcatgtgcaaggcgtgaaaaacgccgtgtccggctacgatggcggcgccgcaagcacggcgcagtatgagtccgtcagcgacggcaacaccggccacgccgagtcggtgtcggtcacctacgacccgagcaagatcagctacggcaaattgctgcaaatctacttctcagtggcccacaaccccaccgaactcaaccgccagggccctgacaccggcacccagtaccgttcggcgatctttgcgcagaatgccgaccagcaaaaagtcgcccaggcctacattgcccagctggatgcggccaagtccttcgacgcacccatcgtcactaaaatcgagatggacaaggtgttctacccggcggagtcctaccatcaggacttcctcaccgagaacccgtcttacccgtacatcgtgatcaatgatctgccgaaggtggcgcagctcaagaagcttttccccgaccagtaccgcgccgagccagtgctggtaaaacaccagtaaccggaatgtgggagggggcttgcccccgatagcggtgaatcagtccccgaattggctgactgacccactgctatcgggggcaagccccctcccacattgtttaatcccagtggacgttagatgacctccaggtacgagctgtgaatcgcccgcgccagctcgcgcacggtgtcgataaattccgtaagacggctgtgcaggccgtcttcaaggatttcatcaatccccgtataccgcagccgcgcctcgaactccgctgccaggcgctgcgccgtgcgcccataactgccgggcaggtccgcgaggatatggctcaactcctcgatgcacgcatgcaacgagcgcggcacatcgctgcgcaacagcagtaattcggacacggaacgggcattcaacgcgttcggatacagctccgtgtacgcctcgaacgacgacaacgcacggagcagggcgctccactggtaataaccgcgtgccgacaaatcactgacttcttccgattcctcgccgaacatctcgtagcgcgcatccagcaaacgcagggtgttgtcggcgcgctcgacaaaggtgccgaggcgaatgaaccgataggcgtcattgcgcatgatcgtccccgaggtggcaccacgaaacaggtgcgaacgctgcttgacccagtcacagaagtggctgatgccatgtcgcgccaggccgccggcggcgatactgcgcatttccagccaggtggcgttgaggttttcccacatgtcggcggtgatgcgtccgcgtacggcgtgggcattgccacgggcggcgcgcaggcagttgtagatgctggcggggttttcttcgtcgagggcgaagaagtgcagcatgcgctcggcatccagctgtttatgccgctcaaggtagctgtccagggtgccgctgctgagcaacgacatggccagttcgtccagaccgtcgctgcgcccggcttgtggcatcaacgacagcgagtaactgacttcgagcatgcgcgccaggttttcggcacgctccaggtaacgggacatccagtacagatctgcggcggttctactcaacatactcagccctccaccacccaggtgtccttggttccgccgccttgcgacgagttgacgatcaacgagccttccttcaatgccacgcgggtgaggccaccgggcaccaggcgggtttccttgcccgacagcacaaagggccgcaggtcgatatgccgtggggcgatgccgttttcgacgaaggtggggcaggtggacaggctcaaggtcggttgggcgatgtaggcatgggggcgggccttgatgcgttggcggaagtcctcgatctcggcggcgctggaggccgggccgaccagcatgccgtagccgccggacccctgggtttccttgaccaccagttccggcaggtgggccaggacgtgggacagttcatcgggcttgcggcactggaaggtcggtacgttttgtagcaccggttcttcgtctaggtagaaacggatcatttccggcacataggggtagatcgacttgtcgtctgccacgccggtgccgatggcattggccagcactacgttgccggcgcaataggccgcgaccaggccgggcacaccgagcatcgactcggggttgaaggccttggggtcaaggaaggcgtcatcaatgcgccggtaaatcacgtccaccggcttggggccgtcggtggtgcgcatgaacaccttgaggtcgtgcacgaacaggtcggcgccttccaccagttccacgcccatttcccgggccaggaacgcatgttcgaagaacgcgctgttgaagcgccccggcgtcagcaccaccacattggggttgtccaggcggctggagctcttgagggtcttgagcagcaggttggggtagtggtccaccggcgcgatgcgttgcttggcaaacacctcggggaacaggcgcatcatcatcttgcggtcttcgagcatgtagctgacgccgctgggggtgcgcaggttgtcttcgagcacgtagtaggtgccatcgccgtcacgcaccaggtcgacaccggagatgtgcgagtagatgtcgcgatgcaggtccaggccgaccatggccttctgatagccctcgttacccagcacctggtccgcgggaatgatcccggccttgatgatgcgctggtcgtggtagatgtcggcgaggaacatgttcagcgcattgacgcgctggatgcagccgcgctcgatcacgctccattcactggcagggatgctgcgcgggatgatgtcgaaggggatcaggcgctcggtgtcttgttcgtcgccgtagagggtgaaggtgatcccggcgcggtgaaacagcaaatcggcttcgcggcgacgctgggccagcagttccggcggcgtattcgccagccagcgggagaagtcctgataatgcgcacggcaggcgccgtttgcgtcattcatttcatcgaagaaagatcgagccattccagtaccttgtcagtgccgagggacgcttgggtggcactgccgtttcaaaaaacgcattttttatgagcccgtggctaagggtgccactgggcctggtccttactttcttgtggggtcggctctgggtcggggggtaacgaatgctcctgtatccgggcagatgaatggataaagcaatgcctgtgccgaaaccgcgaatcttgtggtgagcgggcttgccacagaagcctgttcaccacagaaggccatcaccccaacaagcccgctcaccacaagagggcagcggcttgaaggtgccccgacttggtgcatgaacaaacttgaacttcactcgccaccgactcttctaacaggactcgaacctgctgggagcaccgtcgtgcccagaatcatctctccccatacgccggaagcggccctgaccgaccacagcgaacacaacgcgaagatcttcggttcgcccaaggaccggttggacttctaccggcgcgaaatccagtacgaaaccaccatcctggccaaccgcaccgacgcctacctcaccgcgcagtcattcctggtgatcgccttcgtctccggcatgggtaacctcaaccctgagtggggcaagctgttcaccctggtggtgccggtgttcctggtgatgctcggcgtgctcagctcgttgaatgcctggccggggatccgtgcggcctacgagatcatcgaccattggcactacaaacagagtgaactgctgcgcagcgagccggtgatgggcctggcctacgatgagtcaccgttgttttccgagatggagtcgtcccacaagggctatcgcaagtcgctgctattctcaatgcgagcgccctggctgttcatggtgttctggctgttgctgggggcgtacgcgttctatattcaggtggataaccctggctcataaccgaggagagcgtcatggcaaacgactgcgaggaagaagaaccgaatgacccgggcaacgaagacccgggttccttgatggacgatgcaaccgtgccgttgattgaccaggagggtgacgctaccgagccgccggattgaagcctattcgatcaactgtttgccgatggttttcatccggatcatgtccatcaactgccgcagccctggctgcgactgccgtcggctcgggtagtacatgcacaacggctcgccctggcaggcccagtcgggcatgacctccaccaggcggccgtccttgagctcctgttccacgcggttggacaggcagtaggcgatgcccaccccttgcagcgccgcattcacaatagtctcggtatcagccgcgctgaagtggcccggcacgtcgatgcgttgctggcgggtgccgttgcccagttcccacttgtaggtggtcttgtcgcccaggtacatgcggatgcaggcgtgttgcagcaggtctttgggcacctgcggcgtgccccggcgggccaggtaggcgggcgacgcgaccacgatccagcgcagctcaccggtcaagggcaccgccaccatgtcctggggcacggtggcgccgtagcggataccggcgtcgtagccctcggcgatgatgtcgatcatctggtcctgcacgatcaggtccacgcgcagttgcgggtaggcggtgcagaagtccccgaggatcggcgccagcagcaataccgccgcgtcccgtggcacgttcaagcgtagccggccaatgggcgcgtcgcggtacaactccagggtgtcgaggccgtccttgatggtggcaaagccctgggtgagtttttctgccagcagcgaaccggcatcggtgggttccacggcacggctggtgcggtacagcagcttcacccccaggcgggtttccaggttgcgcatggtgtggctcaaggccgaggtggtaacgcccaactcatgggcggcgtggcgaaagctgcggcgacggatgatagccatgaacacgttgagatcggccagttcggaacggttgaaagcagccattttcaagcctcttatgcgggagttcggctgtatgcggcgttgagcccgattcaaccgtggatgacttagagtaattgtttttctaagcattattgcaagccacgagatattttcatgcgcgttgagaccatcagaattgccggcatcgaacaggcggtctcgcggatcgccctcggcacctggtccatgggcgggcacctgtggggcggcgcggacaccgagcaagcctcgcgcaccttgcggcacgcgttggcggtgggtatcaacctgatcgacaccgcgccggtgtacggctttggcctgtccgaagagctgatcggcaaggccttgcgcggcgtgcgccacagcgccgtgatcgcgaccaaggcggggctgcaatgggacaccggcgccatccggcgcaacgccacggcccagcgcattcgcaaagagctcgaaggttccttgatacgcctgggaaccgactacatcgacttgtaccaggtgcactggcccgatccgttggtagcccaggaagaaaccgccgatgaattggagcgcctgcgccgtgagggcaagatcctggcggttggcgtgagtaattattcctcggcgcaaatggacgatttcagccagtacaccgccctggccacggtgcagccaccgtacaacctgtttgaacgtgccatcgacagcgacatcctgccctacgccaaacagcattcgctggtggtcctggcctacggcccgctgtgccggggcttgctcagcggcagcatgcacacagccacgcgctttgccggcgacgatgtgcgtacgctcgaccccaagttcaagccgccacgcttcgagcaatacttggccgccgtggccgcgctgagtagctacgcccgcgaatgccacggcaagtcggtgctcgccctggccctgcgctgggtgcttgaccaaggcccgaccatcgcgctgtggggcgcccgccgcccggagcagctgaagggctatcaagaagccttcggctggcacctgacgcccgaagacctgtcgcatatcgaccgtatcctggccagcacgataaaagatcccatcggcgcggaatttttagccccgcccaagtgttgacccttcgacagggatgtccaggtttttgcatgaagcgcggcacctgatgaacccgctgtaactgtcagccccgtagaacaggtgataagcaccctgtggcgagcaggcttgtcctgcgttgggttgcgaagcagccctgaaacccgcggccgaagcgtgcctgactcagcgcattcctctttccagggtcgcttcgcaacccaacgcgggacaagcccgctcgccacagttgcagtgctcgccctccaagactttgaaagggctggttgtaaatgtgcggaaatcgccataacgacctctttggacgataaacgacaccgggccaaacatgcccattgaacgactgttcagtttgcactatgttgaccgcatccacccgtttggaaccgaacgggttagcgctttttcttcttgaacgagaggctctggcatgcggttttcccccttcgtcgaacgaattgcagggcagggcgtagccgcctgggacatccaccacgccgcgttccacgccgccagtcagggcgaagacatcatcattctcagcgtcggcgacccggatttcgccacgccgtcctttatcaccgacgctgccgtcagcgccttgcgcgatggcgacacccactacaccgaaatccctggccgcccggcactgcgcgaagcgattgcagcacgctacagccagacgctggcacgcccgctcgatgccgcaaacgtcatcaccgtggccggtgcgcagaacgccttgttcgtgacgtcgctgtgcctgttgcaggccggtgacgaggtgctggtgctcgacccgatgtacgtcacctacgaagccacgctcaaggccagcggcgccacactggtgcgcgtgccgtgttcccctgagtcgggctttcgcgtcgatgccgcgttgctcgccgccgcgatcaccccgcgcacacgggcgattttcttctccaacccgaacaaccccaccggcgtggtgctcaacccgcaggagctgcaagccattgccggcctggccatcgcccacgacctgtgggtcgtggtggatgaggtctacgaaagcctggtgttcgacggcgagtaccacagcctcgctgcactgccgggcatggccgagcgctgcgtggtgattggcagcctctccaagtcccatgccatgaccggttggcgcatcggttggctcatcgctgcgcccgcgctgatcgcccatgccgaaaccctggtgctcagcatgctttacggcttgcccggctttgtgatggaagccgccaccgccgccgtgctggcccatgatgaagtgacccagggcatgcgcgagatttatcggcgccgccgcgacctggtggtggccgggctgagtgcctgccctggtatccaggtgcgggcgccgcaagcggggatgttcgtgctggtggacgtgcgcggcaccggcctgggctccctggattttgcctggcgcctgtttcgcgaagcgggggtatcggtgctggatgcggcggccttcggcgagcccgcgcaaggtttcgtgcggctctcgttcaccctcggcgaagaacgcctggcgcaggcctgccaacgtatcgcgcagtttgtcgccaagctggccggtgagccacgtatcgccgccgcgcccagggttgaagtggcgcaacctgtcgcagccaggaagatgatcgaggtcatcgacctgcataagcgcttcggcaatatcgaagtgctcaagggcatttccctcacggcccacgaaggcgaagtcatctcgctgatcggtgccagcggctcgggcaagagcaccttgctgcgctgcatcaacatgctcgaagtgccggaccagggcagcattcatgtagacggcgaaagcatcaagctcaactacggccgccccggcgcacccctggtggcggatgcccggcagttggtacggatccgctcgaccttgggcatggtgttccagaacttcaacctgtggccgcaccgcaccgtgctggaaaacctcatcgaagcccccacccaggtattgcgcgaaagccgcgccgaggccatcgaacgtgcagaaagcctgctcgaccgcgtcggcctggccgccaagcgcaatgaatacccggcctttctttccggtggccagcaacagcgcgtggcgattgcccgggcgctggccatgcgccctaaagtcatgctgttcgacgaacccacttcggcgctcgacccagagctggtgggcgaagtgctgcgggtgatccgctccctggccgaagagggccgcaccatgatcctggtcacccatgaaatggcattcgcccgggatgtgtcgtcgaaagtggcgttcctgcaccaaggcatgatcgaagaaaccggttcgccggacgcggtgtttatcgacccacgcagtgaacgttgccgacagttcgtcaacgcgcaccaaactcgctaactccagaaaaagacggggcaacatcatgcaattcaaacgtatggcaacgtggttgagcagtgcagtgttgatgctggccgcaggtttcacctgggcggccgacaagcccatcgtgtttgcggtggcggccgaaccctacccgccgtttaccgtgaagggcggtaacggccagtggtccgggttcgaggtggacctgatccacaagctctgtgaaggcatgaaagccgaatgccagatcaaggaagtggcgtgggacggcatcattccctcactgctggcgaagaagatcgacgtgattttctcgtcgatgtcggtgaccgacgagcgcgaaaaacagatcgcgttcagccgcgcctactacgattccctgctgggagttgcggggccaaaaggcagtgaagtcgagatctccccggcgggcctcaagggcaaattgatcggcgtgcagatctccacggtcagcgccaattacctgaagaagtattacgaaaacatcgccgacctcaggtactacgacacccaggaatcggccaacgccgacctgatcgccgggcgtatcgactacatgatggccgacgacaccgccatcgccatgatggtcaagaccccggaagccagcggcctggcgcacatcgccagcgtgccctacgacccgatcatcggccgtggcgtcggtgccggcctgcgcaaggaagacaccgcgctcaaggcccggctggacaaggccatcggcgagttgctggtgagcaaggactacgacgacctgtcacagcactatttcggcctgtcggtcagcccgtgcaagcgcaccgataccccggcgtttgtgagcaagacctgtgacagcccgtaccagcaaatcgcccagaagaccgaataaccatgttcgaccttctcggtttcggcgaacaagggtggggccaggcgttgctcaaggggttatggatgaccctgcagatctccgccgggtcatttgcggtgggcttgctgatcggcctggtggtggcctgcgccaagctcagcgcgccgcgtcccatcgcgctgctgatgcgcggctacaccacggtgtttcgagcggtgccggaactgctgctgattctgctgctgtactacgccggctccatgggcctcaacgcgctgatgctgtggctgggcttcgcccaggtgaatatcagcggcccgctggtggcgatcctggtgctcgggctggtgcagggcgcctatgcctcggagattttccgcgcggcgatcctggcgatcccccacgggcagatcgaagcggcgcgggcctttggcctgagcgggctggggctgttccggcgggtgacgctgccgatcatggcaccgttcgccctggccggcatgtccaacctgtggatcaacctgatcaaggacagtgccttgatcagcgtggtcggcaccaacgaactgctgtacaccgccaagcaggcggcggggtcgacccgccaatacctgctgttctacctcgcggccgccgccttgtattacctggtgacgctggcttccaactacctgtccgggcgcctggagcgccgtatccgtcgctggatgccggttgtcgagtgaggcgcacatgcctgagtggataagctactacgccgggctgatcgccaaggggttgcagaccaccttgtcgctgctggtgatttcggcagtactcggttttgccctggcggtgctggtggcgctggcacggttgtcgcggcgcaagtggctggcgcgcagtgcgctggcctacaccagcgtgctgcgcggtacgccgttgctgatccagatctacattttctactacggcttgggcagcctgttcgcccagttcccgatgatccgtggcagcttcctgtggccgtatctgcgcgatggctactggtacatcgtgtttgccctggtgttgtcggtaggcgcctatgtcggcgaggtgattcgcggtggcctgctggcggtgcccaaaggcgagatggaagccgcctcggcgttcggcatgaccccacgccaagccttgttgcgcgtgcgtttgccacgggcgatgcgtctgttgctgccgaccctggccggggagacggtaatgctgctcaaatccaccgcgctggcgtcgaccattgccgtggtcgacctgctcggcgcggccaacgtggtgcgcgcgcagaccttgcagatctaccagccgctgctgctggtggcgggcgtctacctgtgcctgaccttcctgatcgaaggcgtctacgccatcgccgaacggcgcggtacgccgctgcgcaggtcggccggatgagccggtgtcacaggatgtgatcggcgctgaaggcaccgtgacgcaagccttgtacccagcagcggcagatgtgcaacccgttggcagggctgaaggtgccggggttgaggcagccctcgagccagagtccgtcgagcatcgccgataggccaatggcggccaggtggctgtcgtggatcagcaggctttcactgcgggccaggtcgtccaacaggcgttggatcagccccaggtaggcgtggtaactgttttcgtgggactggttaacgtggggcgagtggcggatcaggctccagaacaccacccacacgccgagcaggtcggggtccatgacccgtggcgagaacgaggcactgagaaacgcgtccagccgtgcggcggcgccgtcagccagttcgacctgttcccacagggcagtggtcagctcgttggccagcttgtggtaggtctcggcaatcagcgcgtcgatgctgccgaaatggtggttgagcaagcccaccgatacaccggcttcggaggcgatgcggcgcacggaaatcccggcgtgcccgtcgcgggccaggcaggtgagggcggcggcgatcagcaggtcgcggcgctcgtcggggtcggcacggcgcagtttgtgagggtcgacggtcatggacaggcctttgatggaaacaccacagcgctaaggttagttgaacgtatgttcaatctctagcggttaatgaatgagaggagggcaaggcatggcaaacgacctttcgtggcaggtcatcggcgacgccggcaacccgctgcacattggcgcctggcgcttcgaaggcgacggcagcgggccaagggtgcacctgcaggcgggtgtgcacgcggatgaaatcgccggcatgctggtcctgcatcagctgttgccacgcttgcaggcgtgtcaggaccaaggccgcctcaagggcagcgtcaccgtggtgcctcaggccaacccgttcggcatcggccagttccgccagggccgtttgctggggcgctttcatgaagccaccgggcagaacttcaaccgcgctttcgatcactccctggccatggcgcagccggcgagcaacctggcgcagtggcaaaaacgcctggtgcaactggccgctgaagccgacctggtgctggacctgcacaccgatgacgaagcgctgccgtacctctacatccaccgcagcttctggcccgaccagggcctggcgttggcggcggccttgcgcgtggacctggtgatcgtctgggacgagggcggcgatggttcctttgaagagaccatcatcaaccatgcatcgccgcaactggccgcgaccattgagctgcgcggccaggcggacgtcagcgatgcgctggcgcaacaggatgccgacggcctgtgggcgtggttgtgcatcaacggcgtgatcgacgaggtggccgccatcgccgagtggccaggggacgtggtcgacatgggctgcatggaaaccatcctcgcgccttgcgccggggtgctggtgttcgagaaagccctgggggattacgtggaggaaggccagcgtttcgcacgcatcatcggccgccccggtgacccgtgttccgaagtgatcctgcacgccgcccaggccggccgtatggtcacaggccaccgcgaacgcctggtggcccagggttcggtggtcgccaagttcaccgggacgcgcttatccgacagctacagcggtggcgtgctggacccgtagcggtgtctgtgtgggagggggcttgcccccgattgcggtggatcagctgtagatgagttgactggcctggtgctatcgggggcaagccccctcccacttttttaacgcagtgtgccattggtcgaagtgtgagcccaaccgcttcaaccgccgcatcgcactgtccagatgcgggctggcacagaaatgcaccacccaccggggcttgatcgagtgcctgcgtgcggaaatctcacggactctctaaacgctccagcaacaggcgctccagggtgtccaccggcagcggccggctgaacaggtagccttggatctgatcacagccggcctccttcaagaacgccagttgcgcctgggtttccacgccttcggccaccacccgcaggctgaggctgtgggccagttcgatgatggtacgggtgatcgccgcgtcctgcgggttgctggtgacttcgcggataaacgcgatgtcgatcttcagcgtgtcgatgggaaaccgccgcaggtacgccaggctcgaatagccggtgccgaagtcatcgatggagatcttcacccccatggcgtgcaggcgctgcaggctggcgatggtgtgctgggtgttttccatcagcgagccctcggtcagttccacctccagccaatgcggctcgaccccggtgcgggcaagggtgcgcgcaatatcggcgatcaggtcgccttcgatcaattgatggccggagacgttcaccgacacctccaccgcgcctatcgcgccgcgttgccactcggcgatctgttggcagacctgctcgatcacccaacgccccacgggcacgatcaagccgaggctttccaggatcggtatgaacactgctggcgataccgcgccgtattccggccgttcccagcgcagcagcgcttctagggcacagatgcgaccgctcagcacctcgaccttgggttggtaatgcaccgtgaagtcatggcgtgccaccgcttggcgcaagtcgttttccagggcctggtgggccaggtcatgcacgttcatgccgatctgtcgttgcgccaactcacgggagtggctgaccaggtcgccgcgttccttgagccgcagcaggttacgcacgcgcaaccatagctcgacacgttccaccggcttgctgatgaattcttcggcaccggcctgcaacccgctgacacgggcgctcggttcgctgagggccgacagcatgatgatcggaatacccgccgtggtttcatcgtttttcaactggctggcaacctcgtagccgtccatgcccggcatcatgatgtccagcaggatcaggtccggcggttgccgggccaccaactgcaaggcttcctcgccgctgctcgcgctcagggtctggtagccctcatgttgcagcagggtttccaggagtttgcgcacctggggttcatcatcaacgatcaacaacgttgcgggttggctggccatggagaggactcatgtgagagggcgggtgtgctgttgcaacaaggtatcgatcacctggtacagctctttgtagcgcagtggcttgatgatgtaggcgtcgcaaccggcgagccgggtcttttcgcgatcttctttcatcgccattgcagtcagggcgatcaccgggatgtgggccgtgagcgggtcgcgcttgagcagcgcggtggcagccaggccgtccatgccgggcaactggatgtccatcaggatcagcgccggttgctgttcgcgggccagggtcaggccggtctccgcatccgcggcccacagcacgtcgtggccagcattgaccagtaacaggcgcgccaggcgcatattggcttcattgtcttcaacgatcaggatgtgggccatgtggcctccggggcgcggtgcagcggcagccaggcaacgaaccgcgccccgcagccttcacggctggccacggcgacactgccaccatgcaggtcggtcagccgcttgaccatcgccaggcccaggccggtgccttcgaatttgcgtgccaggctgctgtcgatctggctgaacgccttgaacagcttgtccatgtccgcctcggcgatcccgatgccggtgtcgctgacgctgagttcgaggaacggttgatcagcgccgtcgggcagggcaaagcggtacaccggccagtcgccgggaatctggccgacctgtgcgcgaggcacctggcgcacggtcaacgtcactgagctgccgtgggcgctgaactttacggcgttggccagcaggttgtagacgatctgtttggtcttgcgcaggtccagctgtagaaggccgagatcgtcgggacactccagcttcaattggatgcgttgcaacgcggccttttcccgcacgatcagcaggctgttggccaacagccccgccagttctgcgttttccagttccagttccatcatgccggcctcgaccttggacaggtcgagaatgtcgttgatcaacgacagcaagtgctggccgctggtgaaaatgtcgccgatgtattcgcgctgggtctcgctcatgtcgccgaccaggccatccttgagcgcttcggaaaagccgatcaccgcgttcaacggcgtgcgcaattcatgggacatggtggcgaggaattcggacttcatatggctggcgtgctccagctccaggttcttttcttccagtgcccgctcgaaacctttgcgctcggcttcttcctgcttgcgcgcggtgttgtcggtgccgatcagcaggtagccgatgatggtgtcataccgattgcgcagggccgtcaccgaaaccatggccgacaggcgactgccgtccttgcggatgtaggtcagctcgtagatgtcttcgatacccctcgaggccttgaacaccagcgcttcgaagcccggcgtgatcggcgtatccagttccaggctgagggcggcggcgcgggtgatcagttcgacggggtcggagatatcggcgggggtgatgcggttgaccacatcggcggcggcatagccgagcatgcgttcggcgccgacattgaagatctggatcacgcctttctcgtcggtggcgatgctggagaagtacgcgctgttgaagattgcgtcttgcagggcgccggtcttgagcagggttttctgccgcttgaactcgacgatcttttcagcccgcgattgcggttgttcgggtaacggtgtgtccatcgctttggcgttccgtgacgttcaggcccgccatcatcgaacgacgatggcgcagagcatgctcacagaagatcgcttgagggcgacgaggaggagatgaggtacttggacaatagcagagattatggctttttgatggcgggccaacggctatcccacttcaaatgaatatcttcgggtcaaattggctgcttttcggattaacggctgatgaaacgtttcatctgtcgacaaatgagcaacgcaagcgcttgcgtaaggaaatgtttctacattagagtcgacccactgacgacaaaaataataaaaccaggagctcattcatgagccttgaacccttgcttgaaatgcagggcatcagcaaaaccttcaacggtttgcgcgtgctcaagaatgtcggcctgaaggtctaccccggcgaaatccacgccttgatgggggagaacggcgccggcaaatcgacgctgatgaagatcctctcaggcgcctaccaggccgaccccggcggtgaaatccgcatcgccggccagcccgtccccacattcgaccccgccaccgcaaaaaccctcggcatcgccgtgatctaccaggaactgagcctgtgccccaacctgagcgtggccgagaacatctacctgggccgtgaactgcggcgtggctggaccatcgaccgcaagggcatgcaggcggggtgcagcgaagtgctgcaacgcctgggcgccgagttcaccccggccacgcgggtcagcagcctgtcgattgccgagcgccaattggtggaaatcgcccgcgccttgcacgcccacgccaagatcctggtgatggacgaaccgaccacgccgctgtcctcccgtgagaccgaccgcttgtttgcgttgatcaaacaattgcgcagccaaggcctggcgatcatctatatcagccaccgcatggccgagatctacgagctgtcggaccgcgtctcggtgctgcgcgacggccagtacatcggcgaactgacccgcgaggcgctatcggccgaagtgctggtgaagatgatggtgggtcgcgacctgtcagggttctacaaaaaggagcacgccgcctataaccccggcaacgtggtgatgcgcgtgcgcgacatggccgatggcaagcgcgtgcgcccgtgcagtttcgacctgcatgccggtgaagtgctgggcatcgccggcctggtcggggcagggcgcaccgaactggcgcgcctgatcttcggcgccgacccacgcacctcgggcaccctggaagtggtcggcaagacagtcacccaactgcgtaccccggcggatgcgatccgcgccggcgtcgtctacctcaccgaagaccgcaaggcccagggcctgttcctggacatgagcgtggcggacaacatcaatgtctgcgcctgcgtgccggatgcccatgccggcggggtactcgatcgcgcccatgccgcgcagcgcgccacgcaggcgatcaagtcgctgtcgattcgcgtggcctcgggcaaggtcaatgtcggtgcgttgtccggtggcaaccaacagaaggtgctgctggcgcgcctgctggaggtcaagccgcacgtgctgatcctcgatgaacccacccgtggcgtcgacatcggctccaagtccgagatctaccgcatcatcaaccaattggcccaggccggcgtcggcatcgtggtgatctccagcgagctgccggaaatcatcggcacctgcgaccgcgtgctgatcatgcgtgaaggccagttggtcgcagaagtcggcggcgcctccggcgacgcaatttcccaggaacgtattattgacctcgccaccggtggcgatcaggtggtggcccatggctgaattgaatatcgcaacaaccggtaaggcagagcgcgcccgcgagctgatgcgcacggtcggcatgttgccggtgctgatcctgctgctggtgggctttgccctggccagcgagaacttcctgacggtacagaacctgtcgatcatcacccagcaggcgtcggtgaacgtggtgctggcggcgggcatgacctttgtgatcctcacggcgggcattgacctgtcggtgggtgcgatcctcgcggcgtcggcggtggtggcgttgcaggcgtcgatgtcgccgcagttcggcatgttcgggattgccgccggtatcggctttggcctgttgctgggcctggtcaacggcgggctgatcgcctttatgcgcctgccgccgtttattgtcaccctcggtgcgctgacggccatgcgcggtctggcgcgcctgttggcggacgacaagaccgtgttcaacccggacctgccgtttgcctttatcggcaacgactcgatcctcggtgtgccctggctggtggtgatcgccgtggcagtggtggcgttgtcgtggttcatcctgcgccgcaccgtgatgggcgtgcagatctactcggtgggcggcaacccggaagctgcgcggctgtcggggatcaaggtgtggaaggtgctgctgttcgtctacgccatgtccggcgcgttggccgggctgggcgcggtgatgagcgcgtcgcgcctgttcgccgccaatggcctgcaactggggcaatcctacgagctggatgcgattgccgcggtgatcctcggcggcaccagttttaccggtggtgtcggcaccatcggcggcacgctgatcggcgcgctgatcattgcggtactcaccaacggcctggtgctgctgggtgtctcggacatctggcagtacatcatcaagggcatcgtgatcatcggcgcggtggcgctggatcgttatcgtcagtccggtgcacggacctgagttcactccaacaacaatcacaagagagacccgcatgaacctcaaacgtatctttccggtcattgccttggctgccctgatgtcccaagccgtcgaagcccgtgagttgaaggccctcggtatcagcatgggctcgctgggcaacccgtatttcgtgaccctggccgatggcgcaaccgcccgcgccaaggagctgaaccccaacgtcaaggtcacctcggtgtcggccgactatgacctgagcaagcaattctcgcagatcgataacttcatctcgtccaaggtcgacctgatcctgatcaacgccgtcgacccgtccgccatggcctcggcgatcaagaaagcccgggatgccggcatcgtcgtggtggccgtggatgtggacgccaagggcgtcaacgccacggtgcagaccgacaacgtcgaagccggcaagctggcgtgccagttcctggtggacaagctctccggcaagggcaatgtgatcatccagaacggcccgcaggtcaccgccgtgaccgaccgggtcaaaggctgcaaggcggcactggccggcgcaccggagatcaaggtgctgtctgatgaccaggacggcaaaggctcccgcgaaggtggcctgaacgtgatgcagggttacctcacacgcttcccgaaaatcgacggcctgttcgcgatcaacgacccgcaagccatcggcagcgacctggcggccaagcagctcaagcgcagcggcatcctcatcacctcggtggacggtgcgccggatatcgagaacgcgctgaagaccgacacgcagatccaggcgtcggccagccaggacccttgggccatggcgcagaccgccgtcaacgtgggcaacgatattctcaatgacaaagccccggccgaagcggttaccctgctcacgccaaaattgatcacccgtgacaacatcgcaacgtacagcggttggtcgagccaacattgattcattgagaggaacagcgccgtggtcaccatggatgacgtggcaagcagggcgggggtgtcgacgtcgacggtgtcccatgtgttgaacggcacccgcaaggtcagcccggcaacggtgcacgcggtgcagcaagcgatccaggcgttgggctacatccccaacaccctggcgcgttcgctggcacggtcaagcaccagcacgattggtgtggcgatttcggcgctgtccaaccattacttcagcgaaaccgtgcacgccattgaaaacgagtgcgccaagcacggctacatgatgctgtttgtcgacacccatgacgacccggagcaggagctacgggtggtcacggcgctgcatcatcgacgggtcgacggcatagtgctggcgccctccaacggttccaaggccctgcagtacctacgggacaaccagatcccggcggtgttggtggaccgcatgatgagcgagcaattcgaccaggtcggggtggagaacacgcagtccacccaagccttggttacccacttgattgaacacggccaccggcgcatcggctttatcgccgggcgtgaggggttcagcaccaccgatgagcgggttgccggataccgcgcggcgctgcacggcgcggggttggcgtttgatccgcagttgctggtcaacggcggctccaatactgcgccggcgcgccaggcgacggtgcagttgctgggcctggcggcgccacccacggcgatcatggccggcaataacctgatgaccctcggcgcgatgcaggccctgcgtgaggcgcagatcgacgtaccggcgcaaatggccctggtgggttttgatgattttgactgggcggattttttcgtgccgcgcctgaccctgatcgcgcagccggtccaggcactgggcacgcaggcagtgaacctgttgttgcagcgcatggcgtcgcccgacgcacccgcccacagtgtgcgcctggcgccgactctgcaatggcgtaattcatgtggctgtaatggattggaatgacccccttatgagcagtcccgtttccctcggcatcgacctcggcacctcggaactcaaggccatcctcatggatcttgacggtacggtgctggcccatgccggcgtgcgcttgagtgtgtcgcggcgtcacagcggctggtccgagcaggcgcctgaagattggtggcaagcgtgcctgcaggcgctggccgaattgcgcgggcatcctggatttgcccgcgtggcctgtatcggcctgtccgggcagatgcacggcgcggtgttgctgggcacggacaaccgcgtgttgtacccggcgatcctgtgggacgactcccgtgccatcgccgaggccgaagagttgggtcctgcgtttgccgacatcaccggcagcctgcccatggccgggctgacggcgccgaaactgctgtggctgcaacgccatgagcccgaggtgttcaaggccattgattgcgtactgtcgcccaaggattacctgcgtttgcgcttgagtggcgagcgcatcagcgagatgtccgatgcagcggggacgttgtggctggatgtggcgcaacgtgagtggttcgcgccgatgctgcgggccacgggcctctcgctggagcagatgcctcggctggtggaaggcggcgctgcgagtgccgtgctgacggcgcaaggccttggcttggcgccctcggtggtgattgccggcggcggtggtgacaacccggtggcggccgtggggatcggggcgatcaatgccggtgatggcttcatcaccctcggcaccagtgctgccattgtcgcgattaccgatcacgccgccggtaatcccgcgagtgccgtgcacagcttctgccatgcgctgcctgatcgctggtacaccatgggcgccatgctcgccggtgccagttgcctgcgttgggtcacgcggcttacgggaacggcggatgagcaaaccttgctggaccaggtgcaggcgcagttgccgatcgaacagccagtgtcacttagtacgccgttgttcctaccgtacttggccggtgaacgcaccccgcataacgacccgctgctgcgcggtggtttcatgggcctgggccatgactgtacaccggcgatgctcggttatgcggtgatggaaggcgtggggttcgggctgttggatgcgttgcgtgccgtgcaatcaaccggtgccgacgtgggcgcctgcgcgttggtgggcggaggggcgcgcagtgaatactgggcgcagttgctggctaatatcctgcagcgggacatcttcaccctgcatggcagcgaattgagcgcgtgtatcggtgcggcgaagctggggtttgtggcgatagagcagggtgcacaattgctggcggcggggatgccggtcaaggtccggtatagaccagatctgatgcagcagccggtgttggaggcgcgttatcgcaagtttcaaggtttactgagcgcggccaaggcccttcacgagtagccttttgtagtgagcgggcttgtctgggtggcctgttttggtgaactggcctgttgtggcgagcgggcttgccccgcgttggggcgcgaagcggcccctttcagcatcaccgcgcttctccagaatttggggccgcttcgcagcccaacgcggggcaagcccggttcgctccccacatcaggacccacaacaagctgctgccgctagtcgcccaagggcggcagacgccgtttcaccggagttttcttgacaatggccgtgttggtttcagcgtaggcgttgagccggtcaagcaggctgtccaggtgatccatggtgcgcacatgcaggcgtgcgatgaagcaatcctccccagtcaccttgtcacactcggtgaactccggaatcgcctggatctgccgctccacctcatgcaatttgcccggcaacgggcggatgcgcacgatggcttggagcagataaccgaaatgcctggggtcgatgtcgacggtgtagtgggtcagcacgccgcgctcttcgagacgccggaggcgttcaccgacgctcggcgaagacagcccggtaatcccggccagggccttgagcgacaagcgcgagtcgtccattaaagcagcgatcagttgctggtcgatggtgtcaatcatggtgtccgcctaattaataaaggcaatccaggtgtctagccttttttaggcgctggagccagtctcaaccagattgccataattgagcctcacttgaggagcctcaatcatggatacatccatccgtcgcgggtcgtgggaaatggtcgccgccatgctgatctcgggcaccattggctggtttgtcctggtctccggcgtgtcggtgatcgaagtggtgttctggcgctgtgtgatcggcgggctgacgttgctgttggtgtgcgcgttgctcggttatctgcgtctggacctgatcagctgggccaagctcagcctggcgatgctcagtggcgtggcgattgtcggcaactggttgctgctgttcgaatcctattcccgcgcgtcgattgccatcagtacggcggtgtacaacgtgcagccgttcatgctggtcgtgctcgccgccgtgtttttaggggaaaagatcaccgtgcagaaactcgcgtggctgagtgtggcgttcctgggcatgttggcgattgttaccgcccatggtgatcaaacaaccggcgacgattacctgaccggcatcgcattggcactgggcgcagcgttgctgtacgcgattgccgcgctgatcatcaaacgcttgaaagcagtgccgccacatttgatggcgttgatccaggtaaccaccggcgcgttgttactggcgccgctggtgccttggaacagcttgccggctacgaccagcgcctggggcgcactggtgacactcggcgtggtgcacaccggcgtgatgtatgtgttgttgtacggcgcgatccagaaactgccgacagccctgaccggtgcactgtcgtttatctacccgattgcggcgatcttcgtcgattggatcgccttcgggcatcgcctgggctggctgcaatggttgggggtgctggcgattctattggcggcggctggattgcaacgcggttggtggtggcgattaaaaccgaatgggtggactgaggacgcttgaaccgcgtttattcactcaagtcgagggaacgagttcctacgcctgcgccacacatggagacaactttaagacgaagcgtactgcccgttttagcgaaaactctctcccgtgatgatgaaagatgaaatccaacttactcagctctccgacgcataaatctctggcaacgcagattcaacaggagtcgcaacccacgaataaccgtcatcgacgcgaggtggaatcccctgccgttcgaaccgaaccaggaccaccggaagtagcgcagcctaaatccggaggtatttccaagcccaacgttacatcaagggagtcctcatcagagctccccaaaagctcaatgcgttgggtgagttatcaacacggtgtcaatcttgccgacgcgctggaacctggttcttcgaagcgaatgactcaggaagaactgatcgccctaccggaaaaaatgagcgcagcggccgttacacctgagcaagaagagttgattgctgcgacacgcgttggtcctgcgctggagtgggctgtagctaacggagtccttgaagaaaaaaccgattactcacaagcggaaattcacgaggctattacggcgctgaatctccatttcgaaaaaatggcgaatgcagtcagcacgctgaccacgcctatgccgatgagaaaaaattacttcatcggtacacaactcgtatcgcccatcaagggccatgccgatccggataatccaaaatacccggtggcgctctatgatgacaaaaagtttgcggaagactttaaagttgatctagcgtccaaaaaagccgcttatggcacgatcatccaacagttggtcgctacgcttccattgccggatcggatagccatcgggcagggtgaagtcgaagtgtacgcaatgaaggcgccgggagagggcggtgagcttgaacgcaccgaattcttgattaaaacggttcacaagggaaagacaacggtttatcaaattgcccctgaacggggaactgccaccaagcgtgatgacttcatcaaactcttcaacggcaacgacgttatcgggaagcaaaaattatccgatggcagttattccagtgtgttcactgcttgggaaaggccgaatattcaagacggccggtatcagccaagggtggatcaccgacctggcgcggcattggacaatacgcctttttcagcacagcttcatacgttggagccgctggcgaaatggcctgcggcaccggaagacgcagagggaagcgccagcccgcaggcatccttcttagagcgaagcaatcagatcgggaccgccgtatcccaaaaactgttttatgcgaaggacctggatttgctgctgatggcggaagaagacccggagcgggtcaccgaatccgaaaaaaaggacagggagaactatcagactttcaaagaggacagggagaaacgtcgccaattgctcaaaggttttgtgcctttctggcgcggaatcgaggcaattattgacggtcgcccaatcgaagggatcgcacaaatatggatagatatcctgacattcatgatgcccgttgaaaaagccgccgcaggtgtagtgagggccggtttccagatgattaaacgcgtgattccaaagtttttgaaactgtcgacaaacttcgccagctacaccttcaaaccgggtgttgcaggaattaaatgggaaggtggcgtgcaggggctgaaatggacatcgagcgcttccaagggggcagccaagggggcagaacaattcaggggcgctatggctaccatacctctgacccagccgggcgttagagaaattgagttgggaggtatcaagtattttgttgccgcaaagcctgacgcaggggatggcgtccactacagtctgcgagtggtgagcccggatgactcgacgaagctaatcaatagcgggaaagttgccaagcctgatgaggcaggtgtttggaaaatgcccgaaagggcgggtcgagatgtaagcggcgcgcccatgacgcagatgaaggggacaatgcaagagctcggtgtcctaggcggtgaaatacatacgtttacggatatctataagggcgagacacggctgaatgttgtcgcgcatggcatagaacggagccctgcggaagtagcggcgggcgttccttctaaagtgatggttgatggcaaagcttacagcgcaaaagagttggttgcgtatttgaagacacagggtattgatcccgcaaatccgcgctataaaaatgtccggctgttgatatgttatgcggcagacggcggaaagcattcgtttgccagcgattttcaaaagattgtgggtaaacctgttaaggcctttgaaggaaccgtcaccacgtcgcatggcgcgacggccatggaatatgttcgcaaagagttaataaaagacatgcgcgccttacatccagacttggatgacaacggtatcgaacttttggtccaagccgagatagaaaaactctttagtcaaaagtccatcttcgtcaacaaagccgacggcaccctcgtgcaaatacaaacggcgcctcagggcgccaacatcggtgagcatatacttaggattgaatataaaccggtacatttcacccggtgacgctcttctctcactgacgggccgctttagaacaaggcggcgtatcattaaaaactgccgtttgtaaaagcgaacgtgctcaccgactttttgtgagcacgctctcctatacgttggggatcagtgcgtgccctggaaaataatgttttccgggttgaagtgctccaccgcgctgcccggctgcggcaagccgaggatgtggcccttgatcttgcccaccacgtgcatctcgcagggtttgcagtcgaacttcagggtcaacacttcatcgccatggatcaactgcatcggcgccaccttggtcttcacgcccgtgacgcccttggcctgtttagggcacaggttgaacgagaaacgcaggcagtgcttggtgatcatcaccggcacttcgccggtttcttcgtgggcttcgaaggcggcgtcgatcagcttcaccccgtggcggtggtagaagtcgcgggctttctggttgtagacgttggcgaggaacgacaggtgcgcgtccgggtacaccggcggtggcgttgtttccgccttgcggccaccccttgggtgcgcagccacgcgcgcggcggtcagcgcttcgatcacttcacggcgcagggccttgagctgtgagttggggatgaagaacgcctgcggcgcatccagttggatgtcggtcgcgtggtattcggtggtgcccagttggccgagcaggtcgcgcagggtgtccagcgcctgttccggtttgttggccacgccgaacgggccgggcagggtgacgctggcgctgataccttcttcgctggtggcggtgacttccagctgtgcttcgcgcagacgtgcggcccaggtcaggccgatacggcgctcggatgaggtcttgagcagcgcctgttgccagttgtggtcgaggttgcggttcaacgggtgattcgggcgcagctgatgcaggccggccggcatttcattcggctcgacgcggtagcggtagcgcttctcaccgtcttcctcgaactcgcctttaggctcggcgatgttggcgcggaaacccaccacttcgcgcttgaccagcacattcaggccgtcgccattggacagcggctcatgggtgaccacttgcaggtcacgcttgccggctttttccaccacacccaccggcaggccggtgaaggtcggggtgtcgaaggcgccgatgtcgaccttgcggtcagtgacgaaatagtcggtgctgccccggtggaaggtcttttccgggtcgggcaggaagaaatgcgcggtacggccgctggacgcgcgcgccaggtccgggcggtcttcaagcacgtcatccaggcgctggcgataataggcagtgatgttcttcacataacccatgtccttgtagcggccttcgatcttgaacgaacgcacgccggcttcaaccagtgcgcggatgttggcgctctggttgttgtctttcatcgacagcaggtgcttttcaaaggccacgacgcggccctgatcgtctttgagcgtatacggcaggcgacaggcctgggagcagtcgccacggttggcgctgcggccgttctgcgcgtgggagatgttgcactgcccggagaacgccacgcacagggcgccgtggatgaagaactcgatggcggcatcggtttcgtcggcaatggcgcggatctcttgcaggttcagctcacgggccaataccaactgcgagaaaccggcctggtcgagaaacttggcacggcccagggtacggatatcggtctgggtgctggcatgcagctcgatgggcggaatatccagctccatcacgcccaggtcttgcacgatcaacgcatcgacgccggcgtcgtagagctgatggatcagcttgcgcgcaggttccagttcgttgtcatgcaggatggtgttgatcgtggtgaagacgcgggcgtggtaacggcgggcgaattccaccagctgcgcgatatcgctcacgtcgttacaggcgttatggcgcgcgccgaagctcgggccgccgatgtacacggcgtcggcgccatgcaggatcgcctcgcgcgcgatggcgacatcgcgggcagggctgagcaattcaaggtggtgcttgggcaaggacatagtttttttagtcaggcttgtcacggttgaggcgcgcattgtagctgtgaaatgcctgaccggcacccactcaggcctgagctgccatcgccgtgacttccacgcgcatgccgtcgaccgccaacgcagctacgccaaccgccgcgcgcacgggccagggcttggcgaagaagcgtttgtagacttcgttgaaagcggcgcgatcggccatgtccgtcagataaatggtcaggtgcatcacccggcccatggaactgccggccttctccagggcgactttcagggcttgcagggtgcattcgctttgcagggtgatatcgcccagttccaggctgccatcggcgcgggtcgggatctgggtggacaccaggatgccgttgaagccgatcacatccgaagaaatcgagtcggcatcggggtcaggggtgtagtgcaggtcgtggttggccatgggcgcctcgcgttggcaggttcagaaaggcgcccatggtccccgaaaatcaccgcaggggcaaactacgcccagcggcggaacagcacgctggcatttacgccgccaaagccgaaaccgttggacagtgcatagtcaatcggcatcggccgggcagcaccgcgcagcatgtcgaggccgtcggcgagggcgtcggggttttgcaggttgagggtgaccggggcgatctggtcgcgcagggcaagcacggtgaagatggcctcgataccgcccgccgcccccagcagatggccggtggcggatttggtcgaactgatcgccgggctgccgtttgcaccgaataccgtcctgatcgcggccaattcgcctttatcacccaccggcgtcgaggtggcgtgggcattcaagtactgcacctggtcagcgtcgatcccggcctgacgcaaggcctgctgcatcgctcggcgtgcgccgtcgccgtcttccgggccggcggtcatgtgataggcatcggcactggtgccgtagccgaccaattcggcaatcggctgcgcacctcgggccagggcgtgctccagctcctcgatgaccaggatgccggcgccttcgcccatgacgaagccgtcccgcgcctggtcgaaagggcgcgaagcctgctccgggctatcgttaaagtcactggacaacgcccgcgccgccgcaaacccggcaaggctgacgcgatggatcgctgcttcggcaccgccgcacacagccacatccacttcaccggcgcggatcatgcgcgccgcatcaccgatggcttgcacacccgctgcgcaggccgtcaccggcgcacccagcgggcctttcaagccgtagttgatcgacacatgcccggcggccatgttgctcaggaacgacgggatggtgaacggcgacaaccgccgtgggcctttgctgtcggtggtgcgtaccgcgtcggcaatcgccgggaagccgccgacacccgaggcgatgatggtcgcggtgcgttcctgcgcttcgggcgtgctcggcgcccagccggcctgcttcaaggcttcatccgccgccgccagtgcgaacaggatgaagcggtccatcttgcgctgttccttggctgccagcagtcgatcagggtcgaacccggcgtctggatcctgctgcacgctctgcacctggccaccgatgctcacggccaggtctccgatcaggtcttccggtaagcgacgaatacccgactgcccggccagcaggcgttgccaggtggattccacgtcagcgcccaatggcgtcagtgcgcccatacctgttacaacgatgcgtttactcatgatcaatcgactccagttgcggtgaaggaacagaccttatggacgtcactatcatcatgaaagtaacatggcgtcacgcacattggcactgacccacaggaatccccatgcaacgcaagtccctcaccagcgacgaatgccccattgcccgcagccttgagcgggtaggggagtggtggagcatcctgatcatgcgcgacgcgttgcagggcttgcgtcggttcgatgagttctcgcgcagcctgggcatcgcaccgaatatgctcacgcgtcgcctgagtgccttggtggaggcggggatgctggagcgccgcgcctacagcgaacgaccgccgcgctacgaatatgtgccgacggccaaaggcgaggatttccgtatggtgttgatgtcactggtggcctggggcaatcggcattacgccgaggagggcaccagtgtcgagttggtggagcgtgaaacgggcaggccggtgcagcccatgttggccagcgcggatgggcaagtggtggggtttgaccagtgcaccttgcagcccggtccggcggccagtacgggcatgcgcgaacgtcttgcgtggctcgatgcaaaaccttgatcgcacgagtatttgacgccagaaaataatcccctcaaggcccgtaaagtcacgtattccgcagccgatagctcatcaagacacagggtttttccgcacggctgagggcacgtcatgttcaataaatcactcaaaacagaactggcggccaggacggccgaagtcaccgagtacaaaggactgatcagtgcactggagcgctccatggccgtggtcgaattcgacctgaacggcaaagtgctgcgggccaacgacaacttcctcaagatcctgggctacagcgccagtcaactggccggcaagtcccatcgcgacttttgcctgccggcgctgaccagcagcccggcctacagccagttctggagtgatttgaaagccggcaagtttgtctccggcacgttcaagcgcgtggatgccaacggccggaccctttggttggaagccagctacaacccagtgctggacgagcgcggccaggtgctcaaagtggtcaagtacgcgctggacgtcaccgcccaggtggagcaggacgcggccacccgcagcaagttgacggccgtggaccgtgcgatggccgttatcgaattcgatctgagtggccaggtgctggacgccaacgcgaacttcctcaacgtgatgggctacaccctcgcggaaatcaaaggcaagcaccaccggttgttttgcgagcctgcgctggtcagcagccatgagtacgccgatttctggcgtcgcttgaacaacggtgagttctttaccgggcaattcaagcgcctgggcaagcacgggcatgtggtgtggctggaggccagttacaacccggtgtatgacggcgacggcaaactgatcaagatcgccaagttcgccagcgacatcaccgagcgcgtggagaaattcgaggaagactcccgtggcgcctcacgggcgtaccatatttcttccgagaccgagcgttttgccgagcatggcacccaggtgatccaagagaccgccacggaaatgcgccgcatcgccgagaatatcggcgcctctgcgcggctggtggggcaactgggcgaccgttccgaacagatcaccgccatcgtcaacaccattcgcggtattgccgaccagaccaacctgttggcgctcaacgcagccatcgaggcggcgcgcgccggggaccaggggcgtggcttcgcggtggtggccgatgaggtgcggcaactggccggacgcaccagccgctccacggcggaaatcgccgagatgatcggcatgatcctctcggaaacccgcgacgcggtgaccagcatgaacgcgacccaggaaggcgcgcaacgcggcgtcagcctggccgatcaggcgggttcggtgatcctgcagattcgcaccagcaccagcgatgcggtgcaggcggtgagcatgttcgcgtcgaaactggatgagtcggaagtcatacccaagactgcggtcggctgggtaggctgacgctctccatttggaggagcgagcaagctcgctcctccagtgggccttgtttagagcagggtaaacggatagtcgacgatcaaccgcagctcgttcaggtcaccatcgcgctggtcggcattcgatgccacgatcgcatcacgcacacgcaacgacagattcttcgccgggccactctggattacgtacttggcttccaggtcggtctcgtggtgtgcgccatccgcaccgtaattaccgacataggcgctatgggccggcgtgtgggtgccatcgatatccgagccgttgatatagcggcccatgaaactcaaccccggcacgccataactggccatgttcaggtcatagcggataccccaggactgctcgcccgggccgttgaagtcgttccattgcaccgagttggccaggtacaccgaatcgccgccttcgccggcgccgttgttgccggtgccgatgtagtcgaacggcgtgtcgccatgcaccttctggaacgacagcgtcagggtgtgcgcctgcaggaacgagtaagccgccgccaccgaataggtggtgttgttgatcgccccggccttggcgctgccggtgtcgagggtgcggtacaggttgccgtccagcgccagggactggtcatgccccaacgggattacgtagttgaggttggtgtagtactggcgccagatatcttccagctcaccggcatacagcgtggcgctcagggacgggctgaagctgtacttgccgccgacgaagctggcgctgttggcggcgatgttggcgtaggtggcgtagatatcgtggtcatggttgctggtcatgccactgttggtgctggtgaaatgcccggcttccaggtccaggccggcgatttcgctgctggtcaggtcaaacccggtggcggtctgtggcaacaggcgcgtgccgccggtggcgaagaccggggcggtgggctgcatgtcgccgaatttgagttgggtcttggagactttgatcttcactgcggcgccgactgagccgtaggcgtcttcgggatcgccatggcggtcggtcggcaggttgccggtgccggcgtccgcatgggtggcatcgagtttcagcccgccgtaggcataggcgtccacgccgaagccgagggtgccctgggtgaaacccgaggcgtagttgagcattgcgccctgggtccagtcgatattatcggcccggccgccttcacggttgcggttcatgtagtagttgcgcaacaacccagtgacgctgctgccctcgacaaatcccttggcatccgcctggtcgctgaccgactcggcaaaggccatctggctgataccggcacacaccgccagtgccaataggctcgactgtttaatcatgttgtgacttccccggaataatgaacgcgcgcacagaaacaccgcacttatcgaatggcgcataacgttgtttgggcagatgtttgcaggtgagctgttacggttttttattgtgttcggcgtggttgccgaggtggattccaggcacagtctgcgcggccgccagcgggccaagggatgaaactcaattaattaaacttcacgctgtttaatttctttcgggtgtacgttgaacctgtcttagccgctctgcttcgacaacatcctttggttgccgccgcaggctctgcggcggattttttcacaacatttcacaagccgggtttcatcccttcggcatcggtgcatcagtggcttgcaaggcgcgcgacgtcgacccgataggtcggcctgtcatctttcagtaaccctcaaggtctttgctctcctgaccggcccgacatgatcgcccatgacgatcatgcactggcccccgtcatcaaggagcacgcgcatgtcagcaccggtcagcaatgcacccgcgatcaagactgtcacgaataacgattccagcgccgaatggggtaacgcggtcgatcgggccaaggccaaggacgccggtatcgaatggcagcgccccaaggatgaccaccgctcggcccaagacatcatcgacgatagcccgctgctgaagaacctcggcaaccagagcggagtgaaggacaagttgcgcgaacgtgtcggtgattttgagcacgatgcggacgcggcttatcgcgccaaccaggtgctgggccacgtcgagcgcttcgatgaaaacggttcgcgcctggctggcaacacgatcgacaatggtcgcgtggacggtttcaccaagggcggcgatgccaagcacggcaccgaggccgggcgccttcaagacttcggcaagtatggctgggagaacctcaagggcgagctgccgcacgcggacacggtgggccaggacgataagcgccgtgaggcggcggacaaggctggcatcgtctgggtgctgccggagggcgacaagcgttcggcgcaggacatcatcaatgacaacccgttgctgaagaaccttggcaaccagagtggggtgaaggatgcgttgaaagagcaggtcggggacttcgacaaggacccgaacgcggccttccgtgccagccaggtgctcgaccgggtggtgggttatgacgagaaaggcaacgcgttgacaggcaaggatgtggccaacagcagtgtcgacggctttaccaagagcggtgaagcgcgccatggcaccgaagcggggcgcttgcaggatttcggcaagtacggttacgaagcgctgggcaagcccccgtccaacgaccagatcggtagctacaaagactttctcaagacccatccggaggccgacgcaggctccaggcagatcgctcagtacggcgcgatcctggatgccaagttcgattcgatccgcggcaagaccggcggcgatggcgctgtcaccgaacagaatatcaaggactacctcaagcaaaacccgcaactgagcaaggacgagaaagaggcgctcaacttcttcgcccagcctggcgccttccgcaagctcgacaccgccggcaacagtatcggtgataagcccgacggcaaggtcagccgcgacgacgtgcaggcctggctgaagacatccgcacccaccgatgcccggagtctggccagcctgatcaccgacgtggccaccggtaacctcacgggcaaggtcgccaccagcaagctggacaaggacatcttcgagcatccggaaaagtactcggccgagcagaaggccgcagtgctgctggaactgcaggagacgcagaaacttgtggtcgacggcgccaacgccggggtctggaacagcgactatggcaaggtttccatcgccaaccgctcgggcgcgatctgggagccgcaaaagctgctgcaagacatcaacgaccacatggccatcttgcagggcgacaagccaactgccgagtacatcaagaacgccggcgaccaggcggtgaagaccctgtttgaagagaatcccggcctgaaggacgccgttaccaagacctatgaggaccaggtcaagtccggcaaggccctggacgccgcgtgggacgccaacaccaaggacggcaagaccgaccagcacacagcgctagccggtttctacgccaccgccaccagcctgcagtcgattctgggtatcgacgatgccaaggcgatccagggcgcggtcgccaaatccacgcataacgaagacttcaagaccttctacaaggatcagttggccagtggcgaccgcctgcgtgagttgctcaagcacaacacgcccgagcaggccgcctcggagttcagcctggaagtagcgctttataacgccgcgctcgatccggccttcacggcccagcacgaccaacagctcaacgagaatttctccagcatcgcccaggataacctgttcaagggggctggcttcgacgacatcaagaccgctttcggcaaggacggcggcgcggagttggacgaagacaaggtccgcacgttgatcgaccaaatgcgcaaggaaagtcccgagctgctgctgaaccaggacggcaccgtggccaccaccgaccaggtcctggcgggtttccgtggcaactgggacctgctccgccagggcaccaaggccctggacaagatgggcaagttgtcggacttcgaccccaatggcggcgccaaaggcgcctacggcagcggtgtactgcatggtgtaagcggcctgttcctggcgggtgtcaccattgcacgcggggcgcagagcggtggaaagctgaccacgcgcaacatcgtcgacatcaccaccggctccgtgcagaccaccaccgtgctgatcgagggcggcaccaagggctaccaggaacacctcgccaagtcgatcaagaacggtgagcagaccctcaaggatatgaaagacggcaaggtcatgctcgacctgctcgatgaggtcaaggacaacgtcaaggatggcaagcacgccaaggtcgtggcgaagaacttcgaggaagccgccaaaggtatcggcggcctggccggcatcgtcgtcggggcgtatggcatttttgatggcgtcaacgcgttgcgtcgtggcgacaagctgagcggtggcttcggcattaccgcaggctcgctgggtgtgctggccggcagcgcctcggccgcggagggcggcctgggtttactcggggcgaacctgccacggtttctcccgggcctggcggccacggcgggcgtgctgggcttcctggcggctggcgtggcggtactggcggccatcgtgcccggcctggtcaaggaaggacaggcacaggccaagtcggataagttcggcgaagtgctgggggattcaatccagcgttatggcatcgatggcgtcaaggatggaacgattgccgatattcctaccaaggattggccaggcggggagcaatggacttcgtgagataggctcgcccaccggtgccggtgacccgacatcggtgggcgttctgattctggagtcacttgaacgtcacccgccatagccgcgtggccaggtgatacgtcaccaccaggctgaaccggaaccaaacacccaccgccaccatcacccataacagaaaggggtacttgcgacgaaagaacttccgatagaagtgcaatatgcccctgtgcttatgccattcgacgaagtaaggccgatgttggctgcagccgcccaatgcgtgggttacccgggcgtccggcacaaacaggacgacccatccagcctggcgcaaacgcatacaccaatccaggtcttcgcaatgcaggaagtagcgttcgtcccataagccgatgtgctcgatggtttcccgcttgatcagcatacaggcgccggagatggcttccacggcaatgggcgtggagggcaatggctcctggtgcaataaaaaatcagagaacagcgacggcattacccgcgcaaggcgcgacaggccaaaggcccgcatgaatgcgcgccgtggggttgggaatacccgccgcccgcccggttgctcacggccgtccaggccgcacagtaacccaccgacggcgccgacgtgcggggtgctacgcagtacggcgagtaaacgggctatcgcatcggcggcgatcacggtgtcgggattgaggaagagcaggttcgccgccgtggaaaggcgcgcgccctggttgcaggccacggcgaaaccgaggttggcctcattgcgcatgatgtgcagtgaatcgctgaggagaggctcgccctccaacaggcccaggctatcatcgtgggaagcgttatcaatgacgatgatccgcgtcgcccccgcgttgaaaaccgatgtgacacaggccaacagcatctgccctgcgttgtagttgacgataatgacatcgcactcagcctgggcttgcgaggtgagcaacacgtgcttttgaggtgtttccagtacagccaacgtcgccactccctgtgtactcaaggtattgccgtagaaaaacgaaccgtccacgagttatcacgacgaaaactccgggtctgctcatctgatggattgaaacgcagggctttttccatcgccgcgccgaccccttcggggccgtccagcaaaaacgtgccagggcaagcgccccggtgcgccatctcgccaaacacggtgctgatcaccggcaggccgagtgcgcggtactcgtagtatttgatggggtcgacaaactgtgtcagcgcgtcgcatttgaaggggatcagcccgatatcgaagccagccatggcggccatggcatccgggtgcgagagctccccgatcaattggatattgctgggcagatccccaggcgggcgtgtgtgtattggcccgaccaagcgtatttgcgccaggggaaatgcctcggcaagcgccacgacgatttcccaggcgaaccacttcgcaatagtgccgacatagcccaccaccagcgggttggcgtttcctgcgtgcctggtgatgcggtaaggaagacgctctgtggcacaggcgttgccgagtaatgtcaccctgtcgcaatacgtcgacaattgcgcgtgcagcgcggaggaggatgtcagcacggtggagacggtttgcgctgttgtccgctggcgccgcgccatggcccgacgcgataagccggtataaaactcgcagaagttgtccatggcgtcgtagaaacttgcttcaaacaacggttctcgcagcagcattgacgctaggcaagagggttttccaatgcccagcaccgtgggctgcagtgccaattgccgcacgcgcgtaaacaggggttgccagagcagtcggttgacccaccctgaacccgcaataggctcgatgggtagggcgcgggcccggtacaccgtgagccagggggggacttcggtgtgcccgggtgctggctggggacgacgtagatcgctcagagcagggagacgcgtggggtaggggtctatccaaagcacgggttgttggtgtgtctcatggaaacatcgaaccagctcatggggacgctggctgaaactgtgccagggggttggggaaaggtagatcaggcgcatatgaaaaaatgctccaccagcacctggacgatgcgctctgcagccctgccatccccatagggggagtgatccttgatcatcgccgcgtaaaggctgtcgttgtcgaggagcgactgcaccgactcgacgatgtcatcggtgcgggtgccaaccagttggaccatgccatgtgccacggcctcctggcgttcggtttcattgcgcaataccagtacaggcactcccagagccggcgcctcctcttgaatgccgccggaatcactcacgaccaggtaggcgcttttcatcacgcggataaacctgtggtagcccatgggcgagcacaggtcgacgcgtgcatgccggcccaaggcagtctctatcggaactttcacattcggattcgggtggacgggaagtatcacccgaaggtcctcattacgctccaccagcgtatgaagcgccgtgcagatgtcacgcaagggggcgccaaaactctccctgcggtgcaaggtcaccagcaatacgcgctgtccatcagacggccgctcgcaggccacgtcgtcgcggctgaggctaaggtgcaaagcatcgatcaccgtgtttcccacgacatggatacggtgctcggcaatacgttcgccaagcaggttgctgcgtgctgcctgggtgggcgcgaagtgccatttcgcgattgtgctggccagggttcggttgagctcttccgggaacgggttgccaaggtcgcctgtgcgcagtcctgcttccacatggccaaagggtatttgcaggtaaaagcaggcgagtgcggttgcgaacaccgtcgtggtgtctccttgcgccagtacggcgtcggggcgccactcgatcagtaactgttcaagttgggtcagcaggcggctggtgagcgcgctcagcgattggtcggcgcgcatcaggtcaaggtccatatccggcacgaggccgaattcgtgcagcgcctggtccatcaattcacgatgctgagccgtcgctaccacacggcagtcgaacagcgtcgagcgcttgagcgcctggatgaccggcgccatcttgatgacttccgggcgcgtgcccaccacgaccatcactttgcatgtctgcatgacgtcatccatggcgatggggtatccaggttccccacttgctttcataaatcgctttgttgcgttcaaacagcgcttggcgtgcctgcgttcccatcagcttgaagctggcggacaagtgatggtgaatgaatacatcccgtgcgcaggcgttgaaatagcccgcttgttcgacccgccgacagtagtcgtcatcctcgaagaagccacagccaaacgcttcatccagcggccccacctgagcataggtgctgcgacgcaacatgacgcaaaagaatgccagggtaggcagggcaaaccattcgcccaggtgcctgtaggtgtaaagacgagcgtgtcgcggcatttcggcaagcgagtattcgatgttcaccttcgcctggttaccgatattgttcgtgaccgggccgatcagccctatgccggggttatggtccaggtgattgcgcagtgtatgcgcccaccccggcgtgacctgggtgtcgttgttgagcagcacgaggtagtcgccggtggcggccgcgagtccctggttgttcgccgcggaaaagccgcgattgtccgggttgaggatgacgtggtgcccgtggacgcgggcccagtgttcgagaaatgcgggcgtgccatcgctggagccgttgtcgaccacgataatttccagtgccgcgctcttgggatcggcaagcaaactaccgaggcacgcctgggtgagcgccaggttgttgtaagtcaccacaatcacgctgatatcacgggcacgtcgtgcgggctcagtggcgcccagtaacgcctcaagtcgatgggcccaggactgggacgcagcgaatgccctgcgttggttgccttgtatgcctggcggttctgcgagcgcctgggcgacgccgtcgatgaacgccccgggtgttcgggcgcgatagacccactcgccaaactggtgggcctcagggagatccacggtcaccacgggtttcccggcgctgaggtactcgtagactttcagtgggttggtggcgagcgtcagcggtgtaacccgaaagggcaacaggcacacatccatggcatgcaggtagtcgggaagggcgctgtaggcgacctcgccagtgaacacgacattggggtattggccgagcttgtgttggacgtgggcggtgtcggcaccgatcagcagtatcacatggtgtgcaaaggcttgggccgtcgctgcaacgaggtcgctgtcgaaccagtcggcgattgcgccgtagtagccaatgatcttgcgaccttgcgggtcttggtagaccgaggcgggacgccgcgagaggaactcgtagtcggccgcgttccgtaccacgatgcgttgttgcgacgccacctgttcccattgttgggcaagccagtcagaggtgaaaataatggcctgggcttcgcggaccaattgttgctcaagccctagaatccgagcgtcgttgttgccgaaaccttggtgatgatcgatgcagtcatacaccagtcggttgttcggcgcggccttggccacttcgagccagaaaggatgatgaaccagtgagactgtctcggtgggctgagtagagagcaacagctcgccgaggcctgttcgcaattgcgtcacctgggccggggacggcgctgtcgagtagatggaaggtactttgctgaggcgcaggcgaatttcgaacaggttcccccgttcatcaagcgggcgtatggaaaacccgggggactgggactcttgcaggctgctccccacgtagaaaacccgccgcccgctggcactgagcgtacgtgcgagctgttgtggccgctgatgacgaaaatcccagtcgatcaccccccagatgatgtagtcgggaccattgggggccgctagcatcaccttgagttgccgacgtgagacgctgccatgcagcggtcggcgtaaccacgtgaacaaccggttgtggaggcgcgcagacagccaccggcgaagcgccctgggtaacggcagctggcgataacaagtgcgcaggcgctcgatcagcgtggctttagcgcccgtcatggccgcgcacctcgtattccgggtagtcatgtaacggtgtggtatcgccctgcggccacatggagctgatggagcccggtcggtagaacgtgacggtgacactgcgccgggacgtggggctactgtctatcactcgggaaaccgcatgccaggagttatcgctgcgaaccagcaccgcggagttaccgatcaagggctggacctcctcgatgatgtgggtggggtcttgggaaccgagaatttgcaagcatccgccccggcatgggtgccatgattcattgaaatagagaatatgggtgacgaccttgtcgggcaggtcggggtgggggccgaggttggcgcccgggccatagtgaaacaggttggcttccatgggggcgtcgtgcagatcgataccggtcaacagcccgagtgcccgtcgataggccggtaaagtcagggtttgtgcgagctgcagccactgcgcgctgagcgcctgggggttagccacttggccattagtcattgaaaccaattgcctggcttcgtattcgtagtttttctcgccgccatagcccttgaccactttgaagtgatcgcgagggtaggtttcagccagcgccgtggcattttcgtggctatacaggttgccgatttgtgcccagtggaacggctggagctgtaacggatggtgggcaattttttccaagtcgatcattgagcattccttgccataaactttttgaatcggtgaaaaacaccacgcccatctgcctgggcgagttggcgcctggcgtccctgagctcaccttgttgtgtttgcatgttttcgaatactgcgggcaaggactgcaagacgcggttcatcacctgcggctcacccgctcgacgggtgacaatgagttctgccacctggtcccagtgctcgtgtagctgtttcaccgcaagttgggtggctggggacaatggctgcctgccaagttgcgcaaaaaaccactgcgggtcgagcggatggtcatgacgcaactggaagacacgcccataagccggtaacgctgtgaatttccccgtatccaggtgcgccgaacaaaacaccggtagaccaaaggcgatggcactgatggctaaatgataactgtggcctatcaccccaaccgaatgagcgatcagctcagcgagcagtaaaggtgagggccagaacggtaacgtcatcgagcgatcaagcgtcggccctagtgccgacgcatgatcgccaagcaccgggccgatcggcaggatcagcaactgcacatgcgccaacgcaggactggcgctgcgccaaagatcgaggaatgtatgcaggccgtctgcggcgtgtacgacgaggtaaggtttatccagctcgtattggctcaagaggtcgcgcagttgcgcagatggccgctgtacatccaccagttgggccaggccgaacgctgtatccggcagcacctcgatgcgcgcgtgttggctcactgactgcaaggccgtttgagtcaaggcatcacgcactttgacatgcgggctgtgttcgatggcaagtgccagtagcggcctggcccagtcagggacgtcgttgcaatgcatgcctggcgcgttccagatcaagggaacgccgtgttgcaatgccatcagggcgggaaccagccaatagccggttgggtgatgaatagcgggatcgggcggcaggtagccgtcagcgacaaatttatcgaagcggatgatgaagccgccgccgatcagcgtggcatccaggctatgcgcgattgctggcagttcggtcagggaggtgactgcatagggccattctccgacggttttcccgtgataggaaaaccggtgcatcctgaccgcgcccaagcggcgcgacagttccgcctcggcgatgatgggaaacaacaggtcgccataattggccacgtcgaatgtgccgtggatcgcaatctgccaggttctggtcttatcgttagccaagtgaagtgccatccttgagatgctggccctggggtagccgttcgacgccgaggtcgacgatgccgagaaagtcgttgccgagtaccaacgtatcgaacgacaagagcgcgacctgtttttcgatcagttgggcgctctcctcggtatggccattcatgagtttcaaggtgatgtgatatcggccggcggcaaagcgcgaacggaaccgagcggtaagggaggctttgcaccagccgtcatgcggcggttcgcgcaacaacttcaggttggccccgccgatcaccagtaaacgcggttcctgaatagtcaggctgatacttggcaaggtgatcgattcacgcaccatggcctccacccgcacctcaatcatgtcgtcgtgcacaaaggtggaatgcacttcctgggtattaacgaagtacgccgtgagaatgcgaccttcgtcagtaccaaaggcgatcccgtctttgttcgccaggtgcgcctttggcaccacggccacagcatcagcactggactcgcgacgttgctcatcacgcacatccagcaagtagcgctcggcaacctcctcgggcggcccgctggcgcggatttccccggcgcgcaggtaaaccgcccgtttgcagaagcgcttgaccatgttcaggtcgtgggacacgaaaagtagcgtggtaccgcgtgccgtgagcgcctccaaacgttgcaggcacttgaactggaacgaggcatcccccacggcgagtgcttcgtcgacgatcaggatgtcggggtccacccagacggacaccgcgaaggcaaggcgcataagcatgccactggaataggtcctggtgggctgttcgataaagtcgccgatgccggcaaagtcggtgatgtcgttgaagcggcgttcgatttcggcgcggctcagccccaggatggcaccattgaggaatacattttcccgaccactgaagtcggggttaaagccggagcccaactccagcaacgccgcgatccgaccttggcacacaacgttgccggtggacgcgctgagcgtcccgcagatcaattgcaggagcgtggatttaccgctgccattgcggccgatgaggcctattgcttcacctttttcgatggtcagtgtgacgtcccttaccgcccagagttcgcggtaatgcggggcctttccaggcaacagcagttgtttcaatcggtcctggggccgatcataaatccgaaaaaatttccctaggccggtgagctgcaccgcgatatcagaggacatcggcaaacccgctgcgcattcgctggaaaccctgaaagccaagccacgccacgcagcaggacatcgacaaacccagcgaccaggtcagcgggtcgatcaacttgccccagaacaggacatcccggacctgctcgatgatcaacgcgatggggttgagtaacaggaccgcttggtaggcctcaggcaatacgttgatggggtaaaacaccgccgaaacaaacagcagggccgtcgtcagtgccgtggtcacttggctgatatcgcgcagataaacgccaagcccggccaaaagccaggaaacccctagggaaaacaacaccagaggcaacagtaccaacggcaggaggagggcggtgagcgggggcggaccgagcagaaacaggtggaaaaccaaccagatgaccaagctcgcggttgtgtgagccaggacggaacccagcgatacccagggcagtatctccagggggaatatcaccttcttcacgtagtttgcgttctgaacgatcagggtaggtgcgcgctgcatgcactctgcaaagatattgaagaccaacaggccggcaaataccagcaacgcaaattcccctcgggattcgctcgcccccaaccacttctgtttgaacatcacgctgaacaccaaggtgtagaccagcaacatcaacagcggattcaggaacgaccacgccaggcctatcaccgatcccctgtaacgtcccaggatgtcgcgcttaatcatcgaactcagcagttcacggtgtgcccaggggctggaaaaaatcccgttcgatgccttcgccacatcccgtgattggcctcggatcgcgattttcattttggcttgcaagtgtcatccctgataagtcgagtactgttcatagcgtgtgccaacgaaaccttgactctcaaccgaggtgtgggctgttaccgttggcacatgactgaaagtagttcaaaaaggggaatttacaaatggcgtgcgcagcggacgaaacctttgaagagaggctggtcccattgaagcactgggggagggggcgggggatagctgtgtatcgagccgttcccaaggctcttcattgccttattcggcgtcaatgcggcacgagcagagccctgtagatcaatggcttacagggctgccgtgagtgatgaactgtgtcagggttattcttttacatccatgaactcttccgcccacgccacgtagctttccggcaacgtgtacgtgtgcgtcagttcggtggcactgaggttatccgtgctgtgggtcaactgacgttgggcacgcaggctgtcatacgtcgccttgatcgcggcgaagtaagccccatgaccggcaaccactatgcgcacgccaaggctggccagacgctgggcgtcattcagtttggggttggcgtaggtcaccagcatcagtggcaccgtcaggttttccgcgatcttctccaagtgcacgaaatcggccacaccgaccatgcaaatcccgtcggcgccggctttctggtaggcctgggtgcgttcgataacggcttcggtcggcaacacgccggcattggtccgggcaatgatcgacaactccggatcgacacgtgcttccagcgccgcgcggaccttgccgatgccttcttcaatggagatcaggtcggtggacttgcgcccgaactgcgccggcagcaacgtgtcttcaatggtcaacgcggccacaccggcacgctcgagctcttcgacggtacgcatcacgttcagggcgttaccgtagccgtggtcggcgtcggcgatgaacggcaactgggcaacgcggccgatgcgggtggcttgctcaacgaactcactcagggtgatcaacgcaaaatcgggtgcggccaatacctgcaacgaggcgacggagccaccgaggatgccgacttcaaaacccaggtcagcggcgatacgcgccgacatcgggtcgaagacggaagcggtttcaacgcaggttggggtggcaagcaattcacggaatttgcggcgcagggctgagtgagaaatctttggcatgggctttcctggttctgggcatcgtcttgtgacgatcaatgtctattcgtggtggggccagattaacatgcgggcgggggggagatgatgacgtttcagcattagggcaggggctggtgcatggagcgtgggtttacggtttgggggggacaggcgcccggggcgggcgccgtcctttccttcatgcctgttcttgatagccttttcgcagtttctccgcgatcagtttctctgcttcacgcaacgcgcgttcgggactctccagggatttgatcaaggtctggcccttggtgccgatgcggccgaaactcaccaccacctcagcctccgtgacgccgatacgccagaatttattagagttgccttcgccataggtgaactcgcgcatcgacggcgccgcttcaggggttaccgcaggctcggcttcgatctcgacggtttccacgacctgttccagcgctggcagtgcaggcgcttcttcaccccgaagcagcgcttcgatgcgcttgagcacttcctccggatcgcgcagccagtcatggctgagcacgtcgatgatcctccagccgaagctgcgcaataccgtcgggcgaaagatataacgctcacgcacgtcagtcgcggctgccgtgtcgctgtcgagcagcacccccagactgaagtattcaccgctggcgtcactgatcgccaggtcacagcggaactgtgaacgcccgacatattcctgcaccgagtgcccgcgttggcgcaacgcgacggcgagggcgctgcgcagtttgtccctaggcaggctgacggcaaaggactgcttggcgcccgggttgaggttggccaggatgccctgggagcgcggtgcatcgccgctggcactggcctgggcgaattgcaggaacgcgcgcaatgcggcggcgccgtcgttatgggtgttggtgatggcctcggactcaatgctggcgacaatcgccatgcgcttgcgcgcacgactgaagatcacgttaaggcgtttttctccgccgcgctggttgatcgggccgaagttcatcagcatcttgccgttcggtcccggcgcatagcagatgctcaggatgatcacatcgcgctcatcaccctgcacgttctccaggttcttgacgaacaggccattgaactgcccggcatcttcacgcacgtactcgcgctcaaggcgtgtggcaaaggccgaatcattgctggccaggtcttccagagcctgctcgatggcgccttgctgggcctcggaaaaggccacgatgcccaggctcaggccggtctcgcgttgcagcagttcacgcacgaggttggcgatgtagcgggcttcggccaggttgctgcggctgaggtagacgccatcgctcatcttcaagaagctgatcgggctgtcgagcagcgtgtcggcgccctggatcacggcctgggcgtcgctggagtccagcgcggcgtgggctggggcagggcgctcgatacgccggtcgggaatggtgatcagccgcccttcgtagaacgctgcgttggagaaactgatcagcgcctcgtggcgactgcggtagtgccaggccagcagggtcgccggcaagttgcgtgcggcctggctcagcaggctgtcggcatcgaggttgattgcgatctgttccccgtcctccatggcaatcaggtcgttatcgtcctggtcaccggcactggagaagaagttggtcggtggcaactgcatctcgtcgcccaccacaatcacctgctgcgcacggctcagggcgggcacggcttcttcgctggggatctggctggcctcgtcgaaaatcaccacgtcaaacaggtccggggtcaacggcagggtgtcggacaccgacaacgggctcatcagccagatgggcttgaggtcgttgatcacccggccactgtcgccactggccatttcgcgaatggagcgatagcgcatggtcttgcccagctcatgttccagttcgcggcggcccttggcataggctttcttgaactcgcgggcctgggcgtccagctgggtcactgacatcgccgattgcttcacatgctccagaaatcgctggtgcagggtggcgctgagcacgtgagcgttgctcttgagcaggttgctttcggcctggctgacctggcgcgcggccaggctcaaggccggaccgtcaaagcgtgccatctgcggattggcacggtacaggcgggtcaggttttcctgggcaatcaacccgtccagcacgggttgtggcaaagcatactgttgcacgaccgccaggcagccgggatcggcctggtgcagctcgttgagcaggggcagggtgtcgggcagttcgtcgagttcttcacgcaggtcgcgcaggtattcggccagctcggccaggcttggcgcggcgtcgaacacacactcttgggcaaccagctcggccaggcgcgcgatgggttggcgcaggctggcttcctggcgcacaacgggcaagctgctcgggttgccccgcaggccttcgacccacttgcgcaacagcggtgatgcgctcagttgctgcagcaaggcttgcaggttgtgcacgaacaggtcgatatcctggatgccgtagcgaccttgcaggcgttgctgctcggcgtgcagctcggcggtggcgcggtgttcaccggccaggttgtcgagcacactgcgcaggctggggcgaatcgcgtgctgactgaagtcgtagcggcgttgaagttcgccacgcaggcgccaccagccgggttgcaaccagcgcagcagcgagccttcctggcgctgtacctgctccagggccgcctgggtgtcctggggctcaagtttctcgcgccagtggcgggtggtttcacgggcgttgtgttgctgcacggccagtgcctgcaagccggcctgttcggcgtgcagcgcttgggaacccgttgagccaggttccagcaggtcgaggtgagccgccaggttggcgccggtcagttgctcggcggcttgagtcagcacgcacgcatccgtcagacgcgtgtcaccggacagcaggctggaggatgactccaggaacgactcgacgctgtccatcagcccactggcttgctccagaaacgccttgagctggccgtaggcatgctcgtgggtgaccaggcttgaggccaggtggctgaaggggtgacgcgcaaaactgtcgaggccgaagcgttccttgatggtctgatacaatcggccggtcagctcctgttgtgcctgccagtgccgccattcgggcaagcgttccagcgcttcgggcggcagctgtgcagtaacgggtggcagctcgatcaaatgacggaccaactcacgcaccgaacaggccaaggactccggcacgccggccatcgcctgttcaaagcgctctatcaggcccagttgctggctcagggtcgccagcgtggcgtcacgccgagcttgtaactgcgatgattgggcatcaccggcgatccagcgctcataacactcacgcaggttgcccacgaaggctttcttgtcggtctgggagtcgtgaatcaggcagcacaattcgcccagttcactctgttgcaagcgatggaacaccacgtccagcgccgcacgcttttcacacacaaacaatacgcgcaggccgcgcgcggcgtagtcggcgatcaggttggtgatggtctgggacttgccggtgcccggcggcccctgaatgatgaagtgacgcccggttcgggccaggctgacagcggcgttctgcgtcgcatcaccggccaccacgttccactggtcgggcagcgggatcgggtctggagtctggacttcgacgtctcgcggctcaatcgagaacatccggtcaaacgcttcgttttgcgcgggctcatcgatcagctgtgcgtagtcacgcaccagcgacatcttgcgatagttgaagttggccagggtcacctgggtcaggtcgatgtcccaggcgtagcggtgcccctgattctcgggcatggcgaaggtgctgttctcggtgctgctggcgaccatctgcggatgctggttgcgcagcacaggtttggcgccgacggccaggcgcaacggtaactcgctgggcagcaccttttgctggaacaattgcaggcccagcgggcggtagtcttcgcggtcgtagctgaaatccggcctgaccaagggcatcgccgaatgctgacgggcgcgacgacgctggaagtggtgcagatgctgcacggccttctggtggatcagttcgatttgcggtttgctttgcaggcgcaactcgacgccgggctcggtcagcttgatctggcgcgcaatatcggcgtggatttcctccagggacgtcttttgcaggtcgacggtttccggcaactggatatcgtagagctggcgcagttgatgccgcagtaccgggttgaactcggcttcggtctcatcgcactgcaacatgaactggtcgcgcacaccctttttgcggctcagttccaccggcagccagagcaggggagtgacgatgcgttcttccggcgtgtccttgaggttgtgccagcgcatgaaggccacgaccaggcgcaggttgctgaagccgaactcggcgcggtcgcggcgggtttcctggatgatgcgttccagcgacgcctgcaaccaggtctggtcttcaaaccgcaaccattgctgcaggccaaccggtttgccgctcaacacctgctcggagaagccaccgaaggtaggctgccaggtgcacaaggcttcggggcggatactttcaacgcgcatcaccaagggcacgctggccacggtcaagttgacgttggcttgcgttggccggaagtacagcaggcgattgcgtcgcgaaaggtcaaacaagcggttacgcagatgctccagcaccacggtgcgccgtgaagccgggccttcggcctgggccaatacacgctcgacatccaggctggccggctgttcgcgccaggattccaggcgccgcaccagtgagccgacatccgtggcgcgttcatggcggttcagctcggtcatttcaacgatcaaattggccagcaccgggttgagccggccgttgagctggaacaggttacggcgatgccgggcaaaggccttgaggtcgttgatatcggcaaaatccaacccgcacgccaggcaggccagcaactggccgagctggaaaatatcggttatctcgtcgtggtgcccgaggcgatgctcccaactgtgcaggtcggtgaggaacaccgggtggtcaatggtctgatgcgggtcttcctggacttgcaggtcggtcacggccacgccactttccgaatcccgggtcaggcggaccttgccgacaatattcagtgccgactccggattaggctgcacctgcttgatcgcttccaatgccagccgtggcgagacgccttcgggattgcgcagttgcagcgtgcgttccggcccttgcagcacatcgagataactgagttgggcgacacgtcccagttcatgcaattgcgcaacctggcgcagtaacggcagcgccaggaacagcacatcgtcgatggggacggcgacgccatcgtgggtctgcagcaattgcgtgaaattgatgggttgggttatcgggtccatgtgtcgacctccgctttgagcgcgcgaacgatcgggtcgagctcacgtttgggtaatttgatatcgcgcttgagcacgttgataaagtcgtcgctactgccgagcttcttggcggtgcgcgccgcgtgcaacaaggcctcatcccgcaggtcgcggtccaccaggctcaggtcgagcatgatgaagtgcaggtattcgtggatgcttgcgtcgacacgctcggcattcagcgtgcccaggtccagcgtggtttcgttgtctttccagtcgggaaagaatccacgtacctgattgagcaccacctccgattgcagcacggaggtgccgatgaagctggcgataaagctgcgggtgagggcggtcagctcgacttggccgatcacatccaaacgactgagcgccagcggcccgcgcaaccggccatgcagccaattgtcggtatccggcacctgccgccaccagctgtccaccgcctgggagcgcagaaacgtctccgggtgcgaaacgccttgggacaaccgtgcatccttgccatccagctcctgggcctgcttcaggtaactggcggcatcgacgctgacgatcccggtgtgaatcttgaccagcgaggtaatcgacgcttccggcccgccggccaccagggccgcgcctcggtcggcatagatttcggtgtgcaggctatataaacgcgcggtctgttccaggctcggaggcgtattcatatcagccatggcgtgattgagaatccgctcggcggtgagatagtcaccaccgtgctcagaccataagcggtaatgggccagctcatgcccgagcagcgccagtaactcctgagcgtcgagccgttcaagaatcggtccgtagaacaccacatgcacttcaccggccaggtaatacaggctggcgttcatcgcgccgtcgccggcttggtaaagcgtcgcgggcgcctggatctgcaagcattgcagcgccgtctcacaggcctgataggcctgcgggtgggtctcggggctcaggcgataggtgtcccgcagcaactgtgcgcgcacatcctgggcatgttcctgctggacgcccagagacgaggcccattcccacacaacaggctcatgggttttcagataatcgaccacacgctggtggtaaggcaagggggtcaggctgctgatatccagcgcgggggtactcatcgttcaaacgtccttgagaggatacggctccatagactgcgactgtgcagcagagacttgggcgggcatcccggtatcagtgatcggcaatagaggcggagcatacctagggggtaggaaaattacttgtgaaagtgcttggatgcgtggccagctgcaaatgcagttagagtggtgatgattatcttgatcgctgtgtgaaaaatgaatgctccgctttttgtttctctggatggccccaaaggcaccggcaaaaccacgttgttggaggctgtaacggcggcactgagggcggaaaacaagaaagtcattcggctttgcgagcgaaaaagcgacccctacaggggtgaaaccatggccctggtcaatgaacttgccagaaatccttcacgggatttggaatgggctgtgtgtgagcgctttgccgagagtcgccgctggatctcccggaacgtactgactcggcagccgttgggcagcattatcctgattgatcgctggtatccctctgaggctgcgtttcgacacacgataccgtttgcagagattctgcagttgaacctggagctaagcgtgcgagtgccggatctgcatgtcggtgttgtcaccgcgccggatatttcatgggcgagagcaacggcacgatcacgaggattgggcggcacagtgattcagaagtatgcagagcatgttgcgtgtaccgaaatgttcgagcaggcggttgtgggtcagggctgggtgttatgccgtaatgaaggtgcgattgaagaggctgtgaagcaggtggttgttgagattcgtaaagtggctgggtgatacgtgtagcgtaatacatgatttaacataatatacattatgcgtaacataatattgcgtaatcaggggcagtgcccgtcagatttcaacaggcaaaaccccctgtcagattcaaacctgagcaaagcctccatcgacaaacatttcactgcccgtcatgaagctgctctcatccgatgccaggaacaacgcggcggctgccacttcttcaggctgaccgatacggcccagtggcacctgcgccgtcatgtcgtcgatgatcgcctccttctggcctgtacctgacaacgccgagtccaggcctggtgtcgagatcggtccgggtgaaagtacgttcacgcgaatgccggtgcctttgagatccagcgcccagcttctggcgaaattacgcaacgccgctttggtggcgctgtacacgctgaacgccgcggtgcccattgtcccggtggtcgagccagtcaggatcacggaaccgccggcctgcatcagtggcaaggctttttgcacggtgaacagcgtgcctttgacgttgatgccgaacgtgcggtcgaacgattcctcggtgatcgacccgatcggttggaaatcccccaggcctgcattggcaaacagtatgtcaacccggcccttggcagctttgacctgggtgaacacacggtccaggtcgtccagcttggcaatgtcggcctggatggcgatggcgtcaggcccgatcagctccagcgccttgtccagctctgactgtctacggcctacaatcaccacctgtgcgccttcagctgcaaagcgaatcgcggtggccaggccgatgccgctgttgccgccggtaaccactgcaacttttccgttgagcttgctcatgatgactccaaaaaagaatgttgaggcgcaactctagatccgctctattcttttgaatagtatgcaccttttggtaagtacccttggaggcacctcaatcatggccaataactcattcaattgcgggctcgaggcggccctggcggtgattggcggcaaatggaagccgctggtgctgttcaacctggcgcagaatgttcatcgatatggagaattaaggcgcgcgattggtggtgtgaccgataaggtgctgatccagcaactcaaggagttggagcgcgatgagattatttttcgcgtggacttccaggaaataccgcccaaagtcgagtattcgctgacgccgttcggggagtccctggcgtcggcgttgggtgggttgtgccaatggggtacgcagcatatgcaaacggtagagcgcatcgccgcacggcggacgtctgccctctcccaatcctgagccccctgccctgatgcctaactcaactaaatgactatttagttgagttaaatcaatggtttacaactgaaatcgatcaaccgactgcgacagcttgccggccaggctggacaattcgtccgttgttgacgctgtctggccaatgacccggctgttgttttccgacatgccggcaatcatctccacctggtgcgcaatttcattgctggccaggctctgttcaccgatagtgcgcgagatatcgttgaccatctccgtggtgttcagggtcgcttgcaaaatctcgcgaatcgcccgctccacctcggtggttaccgccatgcccttgtccacctgagccacgccctcctccatgctggtcaccgcttcgcgggtactttgctggatacgctcgaccatgctggcgatttccagggttgaggcactggtacggccggccaggctgcgaacttcatcggcgaccactgcgaacccccgcccctgttcaccggcgcgggcggcttcgatcgcggcattcagggccagcaggttggtctggtcggcgatccccttgattacctggataatgctgaaaattgcttcggactctttgtccagcgtgcggatcacctgggccgactgctgcgcggagcgggcaatgccgcccatgtcgttgaccacctgatgaatcacccggccaccgtccttggccaaggtttcggcctggttggccatgtccaacgctcgcccggcatgccgagtgatttcctcgatactggcggtcatttcactcgcagccgcggccatggtgctggccgccgcactttgttgctggctgctgccggccacttcatggcagccgtggctcagttgctcgctcatgccattgaccccgtgggcgttgctgcgcaccacttcgatcatgccgcgcagatcccgttgcatggtggcgaggctgcgaatcaatgtgctggcttcatctttgcgctggggttcgacaatcatttcgctcaagttgccccgcgcaatgctggcggcaatacggctggcagcctgcaacggccccatgatgctgagcatgacccagcggccctgagccaacagcagtaaaaggctggcgagcaacaccacgccgagggttaaattggcgttgctgatggtctgctgtgtaccgaggctggtctgctgggtgttggtctcgatcagctcgctcagcgcggccatttgatcttcaagctgggtgaaggcggtgttgaacgttcccagttcattgcgtgcggcgtcgggattgtccagcgccaaggcgacaatgcgctcaccggcggcaatgtagttgtccaggctcggtttgattttttccaggttcgccttgagcgtgtcgtccaacggcagcttgaggttgtctgccagcacctgccgaaagtgctcagcgtgatccttcagggagctgttcacctgcgctttgctgctggtgcttttgcccaggcccaccagcatggctgacagtacatcggcacgcagggcgtcgtgcatcatgtcggcttccatgtgattgcgcagcaccgtcatgctcaactcgttgtcctgcacggcattgcccatccgggtatttcccaggtagccggcaaggctcatgatcaaggcggtcagcaatccggtcgcaatcaacaacatcaagcgcagtttgatcgtcatgcaggtatccccatagcctggacagccggttgggaacccaaccgcttgagcgtctagtaccgttatcggcagccgttgcttattagtgaagcccaagtcagggaatctgcgcgattcccttgtgctcgcgtgcaagggcagctctttgcctcggcgttatcagggctacatcgaagttgtaatgactctgtaagcgtcatcttgtacagccgcaggcggaccactaagctggccgatcccttgaaggtaccggaattccatgtctcgaagcattgcccacctcgccctcctcctgggcttgatcaccgccgtcggcccgttcgccatcgacatctacctacccgcgctgccaaccctgggcgccagcctgcaggcctcgccggcgctggtgcagatgagcctcacggtgttcttcgtcatcgtcggcctgtgccaattgttctacgggccgatcagtgatgtgttcgggcgcaagccgccaatctatgccggcctggtgatttttatcgtgggcagtgtggggtgtgccttggcgccgaccatcgagacactgatcgcgtttcgtgccctgcaggcgttcggcgcctgcgcgggcatggtaattccccgtgccatcgtgcgggacctgtacaccgggcatgaggccgccaggctgatggcgttgctgatgctggtgatgagcgtctcgccgatccttgcgccgttggccggcagcctggtgattgcgctgtggagctggcgtgaagtgtttgccgtgctggcggtgctggcggcggcgtgcctggtgatgaccattgtgcaactgccggaaacccacccggccgaacgccggttgggcaagaccctgggcaacgccttcagcagctatggcgcattgctgcgtgacccggtattcatcggcctgtcagtggtctgcggttttggcctggcgaccttcttcgtgtttatcggcagcgcgccgttcgtgtacatcgagtactacggcctcacacccacgcagttcagcctcggctttgcgttgaatgctgcgtcgttttttgccatgagccaactcactgcacgcctcagtgcgcgctttggcctggcgccgctgattcgttggtcggtaacggccgtggccgccgtgatggccgtcctggcggccacaacactgtggctcgacagcctggccctgaccatgaccctgctgtttatcggcttcggctttctcggcttgctgctgccggccgccggggtactgtccctggaggatcatggcgcggtagccgggtctgcttcagccctgctcggcgcgatccagatgatcatcggtgccgtgtccatgaccctgatcggcgtgttcgccgatcacacgccggcgccgatgctgatcggcatagcgctgtgcgctattgcggcgctgttgaccacgctgtggaccttgcgtcgtttgccagcgcatttggccaacaacccgccctccccctgattcatcacaagtcaaaccgatccaccgcccgccgccgctcattgtcgtcacgcacgtcataactggcggtggtctggatattggtgtggtgcgcgagcttctgcgcgatcgacaggtcatgctcctcgatcacccgggtgatgaacgagcgacggaagtcatggggcatgatcttcacccccacctgttcgccgcgctggcgggcgatgtagtagatggcatgtttggtgatgcgctcgcgagtgatgtggctgccacggcggatacggttgaacaggaagctgtcatcctgctcgccctccttgagctgctcgcgccgaaacgccagccacgcctgcaatttggcgaacgcccagtccggcgcgtacttgatcaactccttgttgcccttgccgatcacccgcaggctgcgttcttcaaagttgatttgcgccaggtcgaggttgaccgattccgacttgcgcatgccggagccgtagagtatgccgatcaccgcggcatcccgcaggccctgggggcgtgggtcggcggcgcagacttccatcatttcgcggatcaggctgcgccgcaggttgcggccctggcccaggcgcgtaccgggtgcagccttgacggtgcgcatgcgcagcaggtgctcctggctgatcaggttcagacgccaggcttcattcatcaccccgcgcaccgcgttcacatacaacgaggaggtattcggtgcataaccgtcctcgcgcagggcggcgaccagggcgatgacgtgttcgggttgcagcaagtgccagtcgatgtcttcgaggttgatatcctcgaagcccaggcggtcggccgcatcttgcagcacgtagcgcatggtcaattggctggagggggccaggcgggtgaggtatagggtcagtgggttgcggatagactcagtcaaggtagatcagcctttggattaaatacctcgaacaagcctttgtttaatcgaggtatttagtgaattggcgagggccgagtctaacccaggaccagccccggcacaaaatcacggggccgtatcgtcgtcctcggtgggctcctgaggctggacctgggtctggctccactcgctgtcctgcttctgcatcaatgcgaaccagtgctggcgcatgaacgtcaggtacgcctccggcgccttggcaaagtccttctcatcgccataacaccccggcaacggcaattcggtgccctgctccttgtactgactgaccagcgcctgctgcgcggccacgctgcagtccttgggcagaggcatgccgcgcagggcgccggcctcttcgtcccaccaggccgcaccgacgcggtcgaccccgcgcagacggtacttctgcgacttgccgacatgcatgatcaacttgaattcgttggggctgacgtcgctggtgcaggtgcgcgaatagcccacggtggcctgggtgatgccgtcgccagagaggtcggtgactttggtcgcagccctatcaaagcgcagggatgcgtcgaattcgcaatgctgcacatcgtcgtagagcatccacacgcgtttggggcggttgccgtcgatcaggtactgggccgcatacacgaacgccgactgggtgccatcgtcatcgcgctcgctgacttgctcggcgagcaccagcaggttcttgccttgtttatcgtcccaggtatacgcagcgatctgcttgccgcgcacttcgacaccgtccggcacctggtcgatgctggtgagcgccactccgtcatccgctcgtacgctggtgacacacgccacgctcatcaacaaccccatcaacaccggccgcaactggccgcgtaaaagctgcacgctattcatccgatcaccctggcaagagacggcttactttaccggcacttgcagggcattgcagagaatattcttcactgaaaacaggattgaataacattgcgtcgcgatcccccccggcgccttgtgcagcaccgcgtccgcttagctgaaccctagctgtctacctgtcaaataaacgagtttttcatctgcgtttcatattcgtactacatttttacgcttaatcttgcccttgttgacttgagggccatccgcgcttctccaactaacccattgattccgctttacctttacgcaatatcgtctttactgcagttcaccaggaagaacacacggccagcgctcaggaatgtcgaatgaacaccacgcacaccactgccttttaatcagttgcctgtactttcgcccactgattgctgctgtttcagcgctccaagttgctctaaccccgaggtcatgaatctttgaaaccctaccctattcattgcgtgtcgatcgttatcccggtctacaacgaacaagagagcctgcctgaattgctgcgccgtaccaccgcagcctgcaagcaactggcctacgaatacgaaatcatcctggtggatgacggtagccgcgacaattcggcccaactgctggaagacgccgccgctgaagacggcagcaacgtggtcgcggtgatcctcaaccgcaactatggccagcatgcggcgatcatggccggtttcgagcagtgccggggcgaagtggtgatcacactcgacgccgacctgcaaaacccgccggaagaaatcccgcgcctggtcgaacaggccgccctcggttacgacgtggttgccaccgtgcgcaacaatcgccaggactcggccttccgccgctggccgtcgcgcctgatcaacctggccgtgcagcgctccaccggcgtggccatgactgactacggctgcatgctgcgtgcgtatcgccgcaccatcgtcgacgcgatgctcgcctgccgtgagcgcagcacttttatcccgatcctggccaacggttttgcccggcacaccacggaaatcctggtgcaccatgccgagcgcgaacacggcgaatccaaatacagtgccatgcgcctgatcagcctgatgttcgacttgctgacgtgcatgaccaccaccccgctgcgcctgctatcgattgtcggcttcagcctggcggcgctgggcatgttgttcgcctttgcattgatcatcctgcgtatggcctttggtgccgaatgggccggcgaaggcatgttcgtgctgttcgcggtgctgttcgtgttcaccggtggccagttcatcggcatgggcctcctgggtgaatacctgggccgcatgtacagcgacgtgcgcgcccgtccgcgcttctttatcgaaaaagtgctgcgcaaccaaccggcagcaccggctcccgtggtcgtcgtcgacggcctggtgtcctcccatacctctacttctgctgatcaggtctaatcatgagttcaaaagctgttgtattcgcgtaccacgatattggttgtgcaggcattgaagcgctgctcagcaccggttacgaaattgctgccgtgttcacccatgccgatgaccccaaggaaaacaacttctacggttccgtcgcgcaactgtgcgcccgcaacggcatcccggtgcatgccccggaagacgccaaccacccattgtggatcgagcgcatcgccaagctgaacccggactacatcttctcgttctactaccgcaacctgctcagcgagccgctgctggccaccgccggcaaaggcgcgttcaacctgcatggctcgttgctgccgaaataccgtggccgcgccccagccaactgggtgctggtcaacggcgagaccgaaaccggcgtgaccctgcaccgcatggtcaagcgtgccgatgccggtgcgatcctggcccagcagaaagtcatcatcgagcgcagtgacaccggcctgaccctgcacgccaaactgcgcgacgccgccattaccctgctgcgcgacgccctgccgcaactggcccagggcaaactggccgaaaccgcccaggacgaaagccaggccacctacttcggccgccgcaccgccgccgatggcaagttggagtggaaaaagccggctgaagaactgttcaacctggtacgtgccgtgacccaaccttacccaggtgctttctgcgccgtgggcgagcacaaactgatcgtgtggcaggccgaagtggtcaagggcaacgaaggcctggcccctggccgcgtgatcagcgtcaacccgctgcgcatcgcctgcggtgaagactccctggtggtcaagttcggccagcgtaacgccgacggcctgttcctggccggccccgccctggcggacgcactgggcctggtcgacggttccgtactgcgcggcgccgagtccggccgcaagcctcgtcgtacccgcgtgctgatcctgggcgtgaacggttttatcggtaaccacctgtccgagcgcctgctgcgtgacgaccgttacgaagtctacggcctggacatcggttccgacgccatcgagcgcctgcgcagccacccgaacttccattatgtggaaggcgacatcagcatccacaccgagtggatcgaataccacatcaagaagtgcgacgtggtcttgccgctggtggccatcgccacgccaatcgaatacacccgcaacccgctgcgtgtgttcgaactggactttgaagaaaacctcaagctggtgcgctactgcgtcaagtacaacaagcgcgtgatcttcccgtcgacctccgaagtctatggcatgtgccaggaccagtacttcgacgaagacacctccaacctggtggtcggtccggtcaataaacagcgctggatctactcggtttccaagcaactgctggaccgtgtgatctgggcgtacggcgacaagggcctgaaattcaccctgttccgtccgttcaactggatgggtccacgcctggatcgcctggactcggcacgtatcggcagctcccgcgcaatcacccaactgatcctgaacctggtggaaggcacgccgatccgcctgttcgacggcggcgagcagaagcgttgcttcaccgacatcgccgacggcatcgaagccctggcacgcatcattgacaacgaaaatggcgtgtgcgacggccagatcgtcaacatcggcaacccggaaaacgaagccagcatccgtcagttgggcgaagaactgctgcgtcagttcgaggcgcacccactgcgtggcaacttcccaccgtttgccggtttccgcgacgtcgaaagcaaggcgttctacggtaccggttaccaagacgtggcgcaccgcaagccaagcatcgaaaacgccaagcgcctgctgaactgggagccgaccgtggagatgagcgaaaccatcggcaacaccctggacttcttcctgcgtgaagccatgctcgaaatcgcggacaagaaataatgcaggcaggcctccgcatcgacgtcgatacctaccgtggcacccgtgagggtgtaccacgattgctcgagtccctggatgaagctggggtgaaagcgacgttcttcttcagtgtcgggccggacaacatggggcgccacttgtggcgtctcatccgcccgcaattcctgtggaaaatgctgcgttccaatgcggtcggcctgtatggcctggacatcttgctcgccggcactgcctggccgggcaaaccgatcggccgcgacctggggcacttgatgcgccaggccaaggccgccgggcacgaagtgggcctgcacgcctgggatcaccatggctggcaggccaataccgggcgctggagcgaggcgcagttgatcgagcagatccgccgtggcgtcgacaccctcagcgacatactcggtgagcgcatcgactgttccgccgccgccggttggcgcgcggatgaacgtgtggtgcaagccaagcaagcttttaactttcgctacaacagcgattgccggggcaccagcctgtttcgtccaaccctggccgatggcagtgcgggcaccccacaaattccggtagacctgccgaccttcgacgaagtcgtcgggccggtggtggctgccaaagacttcaatgggttcatcctcgaccgttttgccgcgtcgaaactcaacgtttatacgattcatgccgaagtagaagggattctgatggccaacgattttcgccatttgctcgcccaggccgggcagcgcggcatcgacttcaaaccactgggcgagctgttgccagcggacgtgaccaccctgccccagcaacagctggtgcgcggtgcgttgccgggccgcgagggttggctcggagtgcagcaggcatgatccgccgttgggccttgccccttctgctgttggcgtttggtgtgttctacctgctgccgctggctacccatggcctgtggattccggatgaaacccgctacgcgcagatcagccaggaaatgctgctgaccggcaagtgggcttcgccgcacttcatgggcatccgctacttcgaaaaaccggcggcgggctactggatgatcgcgctgggccaggcgatcttcgggcagaacctgttcggcgtgcggtttgcctcggccctgagcacgggcttgagcattctgctggtgtacggggtgtcgcgccggctgtggaatgacccgcgcaaaaccctggtcagcaccgtgctgtacatgagttttgtcagcgtggccttgctcggtggctacgccaacctggatccgcagttcaccttctgggtcaacctgaccggtgctgccctgtggttctgcttcgacagcaccacccgcaacgggcgcctggggtcctgggcgttgctcggcctcgcctgcggcatgggcttcatgaccaaaggctttcttgcgtggttgctgccggtgttgatcgccctgccctatgcgatctggcagaaacgtttgcgtgaactgctgggctatggcgtggttgccgtggtggtggcgattgtcgtcagcttgccgtgggcgctggcggtgcacctgcaagagccggactactggaatttcttcttctggcacgagcatatccagcgcttcgccggtgacgatgcccagcatgccgagccgttctggtattacctgccgctgctggttgcgttctgcctgccgtgggtggcgctgttgccgtccaccgtcaaacaggcgtggcgcgacaaacgcagcgcaaaaatcggttttatcgtgctgtggctactgatgcccctggccttcttcagcctggccaaaggcaagctgccgtcctacatcatgccgtgcctgctgcccctggccttgttgatgggcaataccctggccgacaaactggcccagggacgcagccgtgcgctgcgcatcaacggctggctgaacctgatcatcggcgtagtggcattgctcgcgctgacctgggtgcaattgaagaaaccggtgtacgagcacggccaggaaaccctaagcctggtgctggtgttcacctttctgtttgcctggatcctcgtcaacctgttgcaggcggcccggccgttgcacctgtgggccgcgccggtcctcggcagttggctgatggtggcattgctgcccgccgcgttgccgcactcggtggtgtacaacaagactccggaccaattcatcatcgaccacctgcaggaactgcaaccggccacggccctgttgagcaatgacctgggcgcagcgtcggcactgtcgtggcgcctggcgcgcccggacgtgacgctctacaacaccgtcggcgaagtcaaatacggcctggcctacgcggacgccacgcaccacaaggtggataccacccaagtccagcaatggatgagcattgcgcgccaaaagggcccggtcggcgtggtcatgcgggtcaagggcgatgacgaaatcgcagaagtcgacttactgcccaaggacggcaagcgctacgaacaaggcaacatcgtgatcctgatcttcccgcaggctgcgcaatgatcaccttgctgctgttactggccgcctgcctgttcacctgcatgggccaggtttcccagaagttcgccgtggaaagctggcgcgacctgccggatggctgggcgctgaaactgcgctcgccctggttgtggtcggcgctggtgtgcctgggcctcggcctgctggtgtggctgctggtgttgcaacgcctggaagtcggcattgcctacccgatgctcagcctcaacttcgtgttggtcacgctggtcgcgcgttttgtattcaaggaacacatcgacacccgccattggctgggtgtggcgctggtgatcggtggcgtcgtgctgctggggcgccaggtatgagccgggttcagggctttgccctggccctgggcagcgtcggcctggtcagtgccgcccaactgggcatgcgctggagcatgacgcgcctgccgctgcccagcgaatggctggacgccttcagccagaacagcatcgacctgggcgccctcggcgtcgtgaccctggcgatcctggcctacgcgctgtcgatgctctgctggcttggcgcgctcaagcatttgccgctgggccgcgcctattcgctgctgagcatcagctacgccttggtatacctgctggccgccagcctgccggtgttcaacgaacatttttccgtttcaaaaaccctgggggtggcgctggtcatcctcggtgttctggttatcaactctcgtcgtgctagcgccacaagtcccaggaatgccccatgaaaatcagtgtatttggtagcggttacgtcggtctggtgcaggccaccgtgttggctgaagtcggccacgatgtcatttgcatggacgttgacaagaacaaggtcgagtcactgcaaaaaggccatgtgaccatcttcgagccggggctggctgcgatggtcaaggagaacctggagagtgggaggctgcacttcacccatgatgaaaagttggcggtggaacacggcgaagtcctgttcattgccgtgggcaccccttcggacgaagacggctcggccgacttgaaatacgtgctgtcggtaggcgacgccgtggcccgccaccgcaaagagccggtgatcctggtggaaaaatccaccgtgccggtcggcaccggcgacaccctgcgcgcccacatcgaaaaagccctgcacctggccggccggcaccttgagttcgatatcgtctccaacccggaattcctcaaggaaggctcggccgttgccgactgccgccgcccggaccgcatcatcatcggttgtgagcgcgaagaagtgcgcgacgtgatgcgcgacctgtacgcaccgttcaaccgcaaccatgaccgcatcattttcatggacctgcgcagcgccgaactgaccaagtatgccgccaactgcatgctggcgaccaagatcagctttatcaaccagatcgccgagctggccgagcacctgggggcggacatcgaagccgtgcgcctgggcatcggtgctgactcgcgtattggctaccactttatctaccccggctgcggctacggcggttcgtgtttccccaaggacatgcgcgccctgatccacagcgccaagcaagccaactgctccagcgacctgctggaagcggtggaagccatcaaccagcgtcagaagagcaagttgttcgaacggatcaatgcgttcttcaagggcgacctgcgcggcaagacctttgccctgtggggcctggcattcaaacccaacaccgacgacatgcgcgatgcccccagccgcgtgctgatggaagccctctgggccgccggcgccaacgtacgtgcattcgacccggaagccatgcaggaaacccaacgcatctacggcgatgacccacggctgatgctcatgggcaccccggaatcgaccctgggcggtgcggatgcgctgatcgtctgcacagaatggcagcagttcaaggcgccggacttcgacctgatccaccagcgcctgaaaaccccggtgatcttcgacgggcgcaacctctacgacggcgagcgcctggcgcgcaaaggcttccagtactacccgatcggccgaggcgattcctgccaactgccgattccccagcagcaatgggtagccctgggtgcaggccaggtcgtggaagcctgagacgtgaacagagttcaaccgtccccgctgaatgcgacgattcgccgccaatccctcggtttgggattgctggcgttgttgctgtttatcgccggcaactggcaccaggcgatcattggcttcgactcgcgcttcgtgttgtttgcccaggaaatgctgcggcatggccccagcgtcttccccaccacctatgggcagccttacgcggattacctggccacctcgacactgttgacctggctggtttcattgcccctgggccaggtcaccagcctcacggcctggttgcccacggcgatcgcctcggcgtttatcgtcaccctggtttatcgcctgacggcgccctactccccgcgctgggggctgctgagcattgcgctgctgttgttgagcagcaacttcatcagcgaaacccgtgcggtgtccctcgaccagatgctggccgccatcgccctggcggtgttctacctgggttatgcccatgatcacttcggggcggctaaacgcctgcattggctgtacctgatgctgatcctggggtttgccgtgcgcgggccgattggcctggtgattcctacgggcgtgctctgcagctactacctgatcaaccgacaatggcgccagctgttcagtttcggcttgctggccctggcgctgctggtggcatgcgtgggcctgctgttgctgatggccaagttgagcggcggcgaaagcttcatgcaggacgtgatccgcatgcagttcctcggtcgcatggatggcagcgaaggctcgagcggcacgctgtactacttcaccagttcgctgggcaactacgccttggcgtatccgatggcgctgctggtattgctggccatgctgctcagcgggcgccgcgcgccgggaccggcattgcagttggtgtggtattgcgccgccgcgggcttgctggtgatggtcggcctgtcgattccccaggcgaaaaaagcacgttacgtgctgccgatgttgcccatggcggcgatcattgcggcgtacccgttccaggtcgcacacggacggctcttcgccgggctgcgtgggctgctgctggtgatctggacgctgctgccgacgctgttgatcatcggccttttattggcacgaccgcgctaccctgagcagttgagccatctgggctgggtgttcggcgtgctggcgggcctgcaggtggtggccttggtgacactcttcaagcgccgcctgcgtccggtcggcccggcctttgccgcggtactggcggtttgggccacctatatcctggtggtcgagccgctggagcgcagtatctacgacacccgcacctttaccttgcaggttcatgagcaggtgatgcagcagcgcgcgccggtggtgctgcatggcttgggcaaagacgccaaggccatcaagtacatggtcaacctcgactgcgaccaggtgccgttgttcactcagcaagccgccgacctcaagccactccagggacccgcctggctggtgatgagccaagtggattacgaaggtttgcaagacccgcgctttcggtccatcacgccgaccctgaccggcgaattcgaccgtaacccttacgtgctgctgcacctggccaaacctgtgcaaccttgagcctgcgccggcactgccggcgcggaaacttcccacacagctttacgtaataactgctgccgtttctctttcctgcgcccaaaacccgacggtaaactcgcttgcctggtgcggtattcatgtaccgccacaggtcatgggtgaccacaaggacgagaggacaacgccgtgccagatgatgcttcgcttgataacccagccttgaccagcaccgaagtgcatgtcggctacgttcccctgccaccgctggaccggctgatgggattgcgcgacgcgttggtggcgttgaaaggcccgctggccagtgaacccggtttgcaggagaacctgcgcaagcgttttttcgatgaagaactcactaatcgggtgctgggtaaagtctgctgttcgatagccgtctgaacgtattccaattcattatttttgcattcaaccctcattaatatgcattggcgcctctgttccacgcgcggcacactgcatgggttccttcccccaaatgttggaactttcaaagggcttttccgggcaaccagacaagccttttttttgcccgctgtttatggactgccttccaatgctcgctcgctggttccccgctgctatcaacacccgccccaccgaatggagccgtgccgcgatcggtatggcgcttggcaccttgttcagcgtctggttgtgctctcaggtgtttggcatggatgtcgcgctgcacctgcttggcccgctgggtgcgtcggccgtcttgttgttcgccgtgtcatcgggtgccttggcgcagccctggtcgattatcggcagctacctgtgcgcaggcgtgattgccttgctggtgacgcgtgtcctcggcccgtccctgggctgcgcctgcctggcggctggcatgaccgtggtgctgatgtgctggttgcgctgcctgcacccgcccgccggcggcctggccatgacgctggtcctggcagacccggcgtcagcggcgctgggttggtatgaattgggcgcggtattgctcggcgcaggtgcgctgctggcctgcgcactggcgtacaacaacgccacgcgcacgcgttaccccaaaggcgcggcgccagcgccggcacctctcccgttcaaccccagagccggccgagaccctgccattaccgccgctgatttgaaactggcactggcggacatggagcagttctacgatgtggagcccagcgaactggaagagctgatccacgccgcggaaacccacgccaggcgccgcagcatcggtgaaacactggccagccgggtgccttgagcccggcgcgtgcctactgcataaatgcaaaaacgacctgcaggattgaaggttgtactgggcaaatttgcactggtacgatcgcgagaaggttcatccgtgaacatcttgataaagaacaataaaagcagggagttatcgatgactgctcaggtttcatccgaagcaagccacgccgaaatacttcaggacgaagtcctcgccgaggtccgcaaccacatcggccacctcaccctcaatcgccccgccggcttgaacgccatcaccctggacatggtgcgcagcctggcgtcccacttgcaggcatgggccgatgacccgcaggtgtatgccgtagtcctgcgtggcgccggtgaaaaagccttctgtgccggtggcgatatccgctcgctgtacgacagtttcaagaacggcgacaccctgcatcaggactttttcgtcgaggaatacgcactcgatctggccatccaccactaccgcaagcccgtcgtggcactgatggacgggtttgtcctgggcggcggcatgggcctggtgcaaggcgctgatctgcgcgtggtcaccgagcgcagtcgcctggcgatgccggaagtagccatcggttacttccctgacgtgggcggcagctacttcctgccgcgtatccccggcgaactggggatctacctgggcgtgaccggggtacagatccgcgcggccgacgcgctgtattgcgggttggccgattggtacctggatagccacaagctcgccgacctggaccagaagctcgaccgcctgcaatggcacgactcgccgctcaaggacctgcaaggcgtgctcgccaaactggccgtgcaacaattgcccgatgcgccgctggccgctctgcgccccgccatcgaccactttttcgcgctgccggatgtaccgagcatcgtcgagcaactgcagcaagtcacggttgccgacagccatgaatgggcgctgaccaccgccaacctgatgctgacccgctcgcccctggccatggcggtcacgctggagatgttgcgccgcggccgccgcctgcctctggaagactgttttgccctggagctgcacctcgatcgccaatggttcgagcgcggcgacctgattgaaggtgtgcgtgccctgatcatcgacaaagacaaaagcccacgctggaacccgcccaccctgcacgggctggccctcagccacgtcgagagcttctttcatcacttcgagaaggttgcgaaataagccatgcaagacattgaatacacagaagaacaagtgatgatccgcgacatggcgcgtgacttcgcccggggtgaaatcgcaccgcatgcccaagcctgggaaaaagccggctggatcgacgacgccctggtcgccaagatgggcgaactgggcctgctgggcatggtggtgccggaagaatggggcggcacttatgtcgattacgtcgcctatgccctcgccgtcgaagaaatttccgcgggtgacggtgccactggtgcactgatgagtatccataattcagtgggttgcgggccgattctcaactacggcaccgatgcacaaaaacagacctggctggccgacctcgccagcggccaggcgattggctgcttctgcctgaccgaaccccaggccggttccgaagcgcacaacctgcgtacccgtgccgaactgcgcgacggccagtgggtgatcaacggggccaaacagttcgtcagtaatggcaagcgcgccaaactggcaatcgtattcgcggtgactgatcccgacctgggcaagaaaggtatctcggcgttcttggtgcccaccgcaaccccaggattcgtggtggatcgtaccgagcacaagatgggtatccgtgcgtccgacacctgcgccgtgaccctgaaccagtgcagcgtgcccgaggccaacctgctgggtgagcgtggcaaaggcctggccatcgcgctgtccaacttggagggtggccgcatcggtattgccgcccaggcgttgggcatcgcccgtgcggcgtttgaagccgcgctggcctatgcccgtgatcgggtgcagttcaacaaggcaatcatcgagcaccagagcgtggccaacctgctggccgacatgcaaacccaactcaacgccgcacgcttgctgatcctgcacgccgcacggctgcgcagtgccggcaaaccctgcttgtcggaagcgtcccaggccaagctgtttgcctcggaaatggccgagaaggtttgctcatcggcgatgcagattcacggagggtacggatacctggaggattacccggtggagcgttactaccgggatgcgcggatcacgcagatttacgaaggaaccagcgagattcagcggatggtgattgccagagagctgaagaactaccaactctgactgccaatgtgagaggggggcaagccccctcccacatttgatactcagtgtctttgacaccgggttatttgtctttgaactccggcgcgcgcttggccacgaacgccgccatgccttccttctgatcctgcgtggcgaacgccgcatggaacacccggcgctcaaagcgcacgccttccgacagactcacttcaaacgcgcggttcacgctttccttgaccatcatgctgatcggcactgacttgccagcaatcagcgtcgcgactttcagcgcttcttccagcaattcatcggccggcacgatgcgcgcgacgattccgcaacgctccgcttccactgcatcgataaagcgcccggtcaggcacatttccatggccttggccttgcccaccgcgcgggtcaggcgttgggtgccgcccatacccggcagtacgccgaggttgatttccggctggccgaacttggcgccgtcaccggccaggatgaagtcgcacatcaacgccagttcgcaaccgccgcccagggcgaagccgttcacggcggcgatgatcggcttgcggcggttggccacgcggtcgctgtcgctgaacaggtcgtcgaggtagatctgcgggtaggtcagctcggccatttccttgatgtcggcaccggcggcgaaggcttttttcgagccggtcaatacgatgcagccgatttccgggttggcctccaggccgtccagtgcctggttcagctcgctgacaagttgcgcattcagagcgttcagggcttgcggacggttgagggtaatcagcccgacgcggccctggacttcgagcaaaatggtttcgtaactcatgtatcggctccttagagattgcgtgagatgaccatgcgctggatatcgctggtgccttcgtaaatctggcagacccgcacgtcgcggtagatccgctccagtgggaagtcgctcaggtaaccgtaaccgcccagggtttgcaaggcggccgaacagactttctcggccatttccgaagcaaacagcttggccatcgaggcttccaccagggcgggcttgccgctgtcgcgcagtgcggcggcgtaatgcaccatctgccgggcaaccgcgatttgcgtggccatatccgccaggcggaaagcgacggcctggtgctcgatgagtggtttgccgaagctttcgcgttcccttgcgtaatcacgagccgcttcaaaagcggcgcgggccatgcccaccgattgcgaggcgatgcccacgcggccaccttcgaggttggccagggcaatcctatagccttcgccctcctcccccagacggttggcaacaggcacctttacgtcttcaaacaggatctggcaggtatcggaggcatgctggccgagcttgtcttcaacgcgcaacacgctgtagcccggcgaatcagtcggcacgataaacgcgctgatcccgcgcttgcccgccgccgggtcggtcacggcaaacacaattaccacaccggcgttctgcccggaggtgatgaactgtttgcagccgttcagcacgtaatggtcgccttcaaggcgtgcgcgggttttcaggctgctggcatcggagccggcctgcggctcggtcagtgcgaacgcgccgagcatggcgccgctggccaggggcttgaggaactgctctttctgctggtcgttaccgaatgtgagaatcggcacgcaacccaccgagttgtgcacgctcatgatggtcgagcaggcgccatcaccggcggcgatttcttccagcgccatggcgtaggccaggtagccagtgtcgcaaccgccccactgttccggcaccagcatgccgaaaaagcccagctcggccatttcaccgatggcttccttggggaagcggtgctcgcggtcccactcggcggcaaagggtttcaggcgctcctgggcaaattgccgggcggcgtcgctgatttgcagttgttcgtcattgggcagcatggtgattccttaatacaggcattcgacagccatggccgtggcttcaccaccgccgatgcagatggcggcaacgccacgcttgaggcccttctggcgcagggccgagagcaaggtcaccaggatccgcgcaccggaggcaccgatcggatggcccagggcgcaggcaccgccatgcgcattgaccttggcatgggggatctccagcttgctcatggtcaccaggctgaccacggcaaaggcttcgttgatctcgaacagatcgacttcatccaggctccagccggtcttgctcatcagcttgcgaatcgcccccaccggcgctaccgggaacagccccggttcgtcggcgaaagccgcatgcccatggatcaccgccaagggcctgaggccacgtttctgcgcctcggactggcgcatcagcaacaaggccgccgcaccgtcggaaatcgagctggaattggccgccgtcacagtgccgccttcgcggaacgccggtttcaggctggtgatcttgtccagcttggccttgggtggctgttcgtcatgcaggatggttttctgctctttgcccacggtgacctgcaccgggacgatttctgcggcaaagctgccatgggtaatggcttcttgcgcccgggtcagcgaagcgatggcgaacgcatcctgggcctcacgggtaaacccgttatgcagggcgcagtcttcggcaaaggtgcccatcaggcgtcccttgtcgtaggcatcttccaggccgtcaaggaacatgtgatcaagcaccttgccgtggcccatgcggtagccgctgcgcgcacggtcgagcaaatacggcgcgttggacatgctttccatgccaccggcaatcaccacgtcgacgctgccggccagcagtgaatcatgggccaggatcgccgcctccatgcccgagccgcacatcttgttgagtgtggtgcagcgcgtgcccttgtcgagcccggcacccagcgcggcctgacgtgccggcgcctggccgaggcctgcaggcagtacgcagccgaacagcacttcatccacggcatcgggggcaataccggcacgctcgacggcggcgcgaatcgccgcggcgcccagctgaggcgcggtcaggcccttgaggtcaccctggaagccgcccatgggcgtgcgcacggcgctgacgataacgataggatcggtcatggcaaatcctccttacttggccgccatgcgcaaggcaccgtcgagacggatcacctcgccattgagcatgctgttttcaatgatgtgccgcaccagcgcggcgtattcggcgggtttgcccaggcgcggcgggaacggcacaccggcggccagggagtcgcgaacttcaggggtcatgccggccatcatcggggtttcgaagatgccgggggcgatggtcattacacgaatgccaaagcgggccagttcgcgtgcggcaggcagcgtcaggctggcaatggcgcccttggacgcggcatacgccgcctggccgatctgcccgtcaaacgccgccaccgaagcggtattgatgatcacgccgcgttcgccgtcggcattcgcttcggtttcggcgatggcggcggcggccaggcgcagcaggttgaagctgccgatcaggttaacgttgatcacctgggcaaaactcgccagcccatgggggccgttcttgccgaggattttctcgccacgcaccacaccggcgcagttcaccagcccgtgcaaaccgccaaacgccgcaagcgtcgcctgcaccgccgcttcggcagccgcttcctggctgatatcggccacgcagctgcgagcgttgtcgccaagttgcctggccttggccgccacggcgtcggcattcaggtccaccagcatgaccctggcaccggcgccaatcagcatctcggcagtcgccgcgccgaggcccgatgcaccgccgctgaccaggaagctcttgttttcaatctgcattgttgtttccttgaacggtccgaattgtcggaatagtcgccccgcagccgccacgcggcaatggtcaaagccttcaacctgcctgactgttttggccagtcatcgaccgcactgatcatccggtcggcccaagcgattggacgctggcgacgcttgcttctaacctgatggcctgcgccaccaaagaagcccccctgcatgatagtccgccccaaacccaatctccttggcatcctgttctcgctcaagggttcgattgccaagcgtatcgccctgcgcagcctgctggtcacgctgctggcgtcggtgatcgtgctggtggaaaccctgcacccggcgtacttctccaaggtcaatgccacgccgttcaccttgctcgggctgtcgctgtcgatcttcatgagttttcgcaacaacgcctgctatgaccgctggtgggaaggccgcaagcaattgggacagatgatcatcgatgtgcgttcgctgatccgcgaaacccaggtgctcactgacccggctgagcgtgcaggcctgctgcgcagcctgtgcggcttcgcccacggcctggttgcacgcttgcgccatgaggatgaagcctgggccatcaagccgtggggcacgttccaggccaaccaccccaacctccccgatagcctgctacaacagctgggcgcgcggttttcgatgctcgccgagcaaggtgtgatcagcgagtggcgctacacccaatgggaaacccgactggtgagcctcagccaggtgcaggcggcctgcgagcgcatcaagagcacgccgctgcccttcccctacaccctgctgctgcatcgcaccatttacctgttctgcattttactgccgtttgccatggccgagccgctgggctggttgacgccggtgttcacggccattgtcagctacacgttcttcggccttgatgaaatcggcgatgacctggaggacccgttcggtttcgatgaaaacgacctgccctgcaatgccctcctgcgcaccctggaacgcgaagtattggccgccctcggcgaaaccgatctgccgccgcctctggaaccggtggactacgtgctcacctgacgcgggtttgacacccgccgtagtctgaccgaagctggcggctttgctgccctcgctttcggacgcctgcatgtcaaagtcacgccgttattccatcgtcggcctgtgcgccctgctgttgattgtgctgatcacctggtatttctctcgcaccaccccggtagccgtacctgcggccatcgcccatgggtattcaaaagccttgaaacaggcgcgcaacggtgagcccggagcggctcgcgtgctgtatcagcaacttggccggccggatctgtcccccgagcgtcgcgctgcgttgcatgccgaactgccgaactacccaagcccccaggccctgaaactggcagacaaggacctggccagcgaatcaccgctggtacgcgaggccgccatccacagtattgtcggcctggtgccaaccggccaacgcacgctgctgctcggcccagtgctggatgaccccgagcaggatgtgcggtttgccgccgccaacgccttgcttggcctttcgcccgacaccctgggcctgtacttcgggccgttgcagcaggtactggatgaattcgtgaaaaagctcaaggcccaacccgaaacggccgaaggctggattcaactggcgcgcctgtatatccacagcgccctgttgccggaggcgcaaaacgcgcttgagcaggccatgcgcctgcaaccggataacttgcaagccgtggtcgcgcagatcgagttgctggacaaacaagccaagaccgaggagtcgcgccaactgttggcacgccaattggccgcgcatccggagtcagcctacctgcagcatgcgctgggcatgtggctgctgcatcatggcgaacgtccgtacgccctgctcggcctgtccaaggccgtggagctggagccggacaatcaggattaccgctacgacctcgcgaccacgctgcatgcgcaagaggaactggaggctgcgcaacgccagttggaagaaatcatccaacgccacccggccaatcgcaaagcccgggttttgctggtcaattactggaaagagagcggccaactgcagaacgtccaggtactgctcgcgcagcttgagcaacagaatccggacgaccctgcattgcagcaaggcctgtaggccgactcagaatttgttgaaccgccacaaagcgctacggtcaagagaatatggcacgtccacatgggcgtgcatcctctactcgtatgtgacctgagggcacttcttgtctacatccaaagcgcagttatccgaaaaagcggccatcggcattgaaggtcttgatgacattcttgccggagggctctcgcgcagccacctgttcctgctggaaggtgagcccggcacgggtaaaaccacggtcgccctgcatttcctgcaggctggcgcccgcagcggcgagcgatcgctgtacatcaccctgtcggaaaccgaacgcgaattgcggcaaggcgccaagtcccacggttgggacctggatgacaacattcatatcttcgaactcacaccaccggagagcctgctcaacgctgaccaccagcagagcctgctgtactcctccgacctcgaactgggcgaagcgacccgacaaatcttcgaagtggtggaacgggtcaagccgacccgggtagtgatcgacagcctctcggaaatccgcctgcttgcgcaaagctccctgcgttatcgccggcagatcctggcgatcaaacactattttgtgcgctacgacgctactgtcctgttgctggacgacctgaccaccgagtccctcgacaagaccgtgcacagtgttgcccatggtgttatccgcctcgaagaactgacccccaactacggcgccgaacgccggcgtgtacgggtggtgaagtaccgcggccagaaataccgtggtggcttccacgacttcaccatcatgcaggacggcgtccatgtgttcccacgcctggtggcggctgagcatcgtggcggttacaagcgcgagaccctgagcagtggtatcaaggcattggatgccctcatgggcggcggcgtcgagaccggctccagcagcctgatcctcggcccggccggtaccggcaaatcgctgatctcgatgattttcgccgccgccgccgtggcgcggggcgagaaagccgcgctgtttatcttcgatgaagagctgggtctgttgttcgaacgcatgaagaacatgggtatcgacctggcggccctgcaggcaaccggtaacttgctgatcgaacaggtcgatgctgccgagttgtcgccgggcgagttttcgcaccgtgtaagacgctgcgtggatgagcgcgggatcaagaccgtggtcattgacagcatcaacggctaccaggctgccatgcctgaagagaacgcgctgatcctgcacatgcacgaattgctgctgtacctcaaccgcaggggcgcggccacgttcatgaccgtcgcgcaacacgggctggtcggcgacatgcaggcccccgtcgacatcacttacctggcggataccgtgatcctgctgcgttacttcgaggcattgggcaaggtgcgccgggcgatttcaatcatcaagaaacgcaccggctcccatgaggccactattcgcgaataccggatcggcagccagggcatgaccgtcggcgaaccgctggataacttccagggcgtactgcgcggcatcccgacctacatgggcgccggctcgcccctactcaaggatgaggacgcgtgacgggcctctctccagtctccgagcgagcaattgtattggcgccgatggggcgtgacggctcattggcgctgatgatgcttaacgaagccggctacagcggtatcgtcgccagcaacctgggggcgttgtgcgaggcgctggaagacggtgcagggctgctgatcattgccgcggaggccctgcgcggggtggacctggaaccactgttggagtacctgcatcaacagccggcatggtcggatctacccatcgtactaatgacccatcatggcggcagcgagcagaatggctcatcccacctgagcggcatgctcggcaacgtgaccttcctggagcggccgttccatccggtgaccctgatcagcctggtcagcgccgccctgcgcggccgccgccggcaatacgaagctcgcgaccgcttgatcgacctcagcgaaagtgaactgcgcctgcaacgcacgctggagacccttgaacagcaagtcgaggaacgtaccgcccaactgcgcagcaatgaagaggcactgcgccaatcacaaaaaatggaagcggtcggccaattgaccggcggtatcgcccatgacttcaacaatatgctcaccggcatcatcggcagcctggagctgctgcgcaggcgcgtggcccgtggcaagttggacgatctcgacagcctgatcgacctcggggtgacctcggccaaccgtgccgccggccttacccaccgcctgctggctttttcccgccgccaatccctcgattccaaacccgtggagatcaaccgactggtgacctcgatgggcgaactgctgcaacgcagcatcaacgaaagcatccacctggacatgcgcctcgcggacgccctatggacggccgaggccgatcccaaccaattggaaagcgccctgctcaacctggtcatcaatgcccgcgacgccatgcccggtggcggcagcctgtccgtggagaccaccaaccgccacctcgacagcgtgttcaccgctgcctacggcaccttgaaacccggtgactacgttgagttgagtgtcagcgacaccggctgtggcatcccggaaagtgtgatgggccgcgtgttcgacccgtttttcaccaccaagcccatcggccagggtaccggtcttggactctcgatgatctatggctttgcccgccagtcccatggacatgtgaccatccacagtgaagtgggaaaaggcaccaccgtgagcttgttcctgccacgcttcttgggtgaaatgggcactgccaagccccctgaccccgcgatgccgccgttcgccattgcaggggaaacggtattgatcgtcgaggacgacccagcggtgcgcatattggtcagcgcggtgctcaaggaactggggtatgcctttgtcgaagcgggcgatgccgatacagccgtgcctatcattgaatcagaccagcgtatcgacctgatgatcagcgatgtcggcctgcccggcatgaacggccgccaattggcggaaatcggccggcagatccgccccgcgttgaaagtgttgttcattaccggctacgccgaacatgcggcggtgcgcggtgggttcctcgacccggggatgcaattgatcaccaagccatttacgtttgatttattgaccaccaaggtcaaggagatgattcaggcctagacaggtccatctgatgcacaagaaacaggcagtcgtaacagggtctacaaaagagatcccctggaaacaatgcgacattcataagtaagaaaactttggaacgaagtggggtgtttttctcacgcagtgctggcgcaaagcgtacgaataaacacccgatcactagttttcacggatctttcttatgactgttacttcttatctgccccgatctccccatcctgtctacccgccggtaacgcagagtgcatcgccaattgccatgagccaggccccgacagccgctgccacgccacttgctggcgaaacaccccaggccaaaggcgatggggagttaaaaaatgagattatcaaatcgttaattcaatatcagtcgtcctctactcccaaacccgttcagagcatagatgtaaccaacatcccatcgcgctcttcctacgggcaacagctagcactgcacgacggtatcgttaatagcaaggccttcaaacagtggaagatcgataaccaactggatcaggcagacacgttaaccattgacacccaaaaagggaccatcactggcatcacttacggtaagaattatcaggtcaaaaccgttgaccttcacaccttcgccgggtggcctttgctcctgtccgctaccaaggcactgatgcccgaagaaggccgtttgacgctaagtggcgcaggtgatgcaaaaacaacaacggccactaagttgcataacatagcgcgcttttatggcatagagttcccctctttggaggaatatctaaaagaaggcccgggcgctcagctgaaggcagtcagactcctgacctcaaaactctcaacggaaactatcacacccgccaatgcctccgatccctttaaggaagacttgagtcaccaaaagacccagctagcggacctgaacaaccgttttcgaatgagtacggcgttggcttccctgcctcacactactcgccggtcctcggcaaacgatatatacgaagatatggtcgcaagcagagtctacgtagaacctgaatcgtcctatgctcccaaggtcaaccagccgtacaccccgcaagtggacctggtctcgttgatggaaggttatggcataacccctcccaaatcgtatgaagaggtagacacattaacgaaagcactgcaaagcccacccctgagaacgcccgctcatggcaatttggcaggtgcgctgacgcacttgagcattgaagatcagcgcgtgtttcaccaggtcatcaaggaggccctgagccccgaggaagaaacgtccttactggaccagttgacccgtggtattgaatgggatgagaaggcgttcagcgacagtcctcgtctcgccatcgatgcaatgcttaagtcacctttcgctcaaaagttagcaaaagcggctgaagagcgtctgggtaaacttgcctcgcccgacgctatcagcgactgggctttggaagcgattcacacggtgctgggtccgcatgaagatttggaaaaatatacgaccccgaaaaccctcggacttgcaacgttcattatgtcctcgcgcaagtccccggaaagcctggtcaagaataaacctgagttcttgaccaagggcactcattccggggtcagctttgccaccgcatttgcacgtaccgaagcccaggctcccggagctacaagcaacatgacgtatgccgagatcatgaagcgcgctgatctcccccccgtcacactcgcagaccgaatgattgagcaacaggcccaaaacactgccttgaaagactggggtgtgattaacggtgtcctcgtggcgaatgatcagggcgaatataccgagtcgcaaatggaacaggtgcgcgatagtttcagtcaacaagtctccgagttgaacgccgcttctgagacgttttcaaaagaaatccccgaccttcataaacgggccgtggacgcaataaaaaaatggaacccacacttgacggaggagcaaatcctgagcaagtcgctggatgcaaccgaccccgaattactggcctttccaggaccgtattcgcttgtggacgtgttccttcagaagactgatcgttacgatacatacaggagggacaagtttacctcccgcgaaccaagcattgatctcgatacagttgtcatccatgccgatcaggcatccgtcatgaaaggcagctttaacacagatattaaatcctacagtgaagagcatgagtcagcgacacgcgcacagactaaatatttgatttcaaatttaagcctggacgaccggcgcattattgaaaatggaaaaataacagtctcaagagaagtccaggtcagcacgaacaattttggcgccagcaatgtaaagcgtgtgtcacacagcagcgtgatcgtgcgcagcgaagttcaggaagaaggtcgcactcgcgtctactcctatgaaatcgacggggccaccaataccgtccgaaaacgtgatgatttgaaggatattacacctggatcgctacctggcgagttccctaccggcctcacgtcgacttacttggagtccatcattcctgatggcgactatacaacgggtttgctcgaccagcatccgtctggcgcttccgacggtgtacccaatagctactttagcgaacggtcgaagtacatcgcggacgccatggtaaaaagtgtcgatataaagggttatgaggactatttgagagggcaaacaacgtttgatactgaagttcccttttatcagaagatcgttgattttttaaaaggacttattccgggttacaacgccgttgaaaacttcgttgccggcaagtggcaggaaggccttgtcgacctggcatgggatgcattcggctttctgctcgccggggcgacggcgacggtaaaagcgggtgcattcgcagctggcggtgcttccaatacattgctcaaagggggtaagaaactggcgcgtggcgctataggcgcgctcaaccccttggatccgcaaggcttgggtttggccggtgtacaagaagtcataaaaacagtgcaaaggccaggtgtcgcgggcagcaagagcttgcccttcagtggcttcaaatttgacgtcgcgaacactttcaagaacgtttcccacgccacgataggaactgccgatcgtggaggtgaaaaacaagaggtcgcggcgactcagtggaatggcaactggtatgccctcgaccccgtcacctataaaccgtatggtcttcccctgaaggatttcgcagccagttcatgatgaactccgccaaggttgttcactgctcccggggacaaccttggcggtcaatgcacggaccgagcacatacgcattgactactttcatcacgccagtaaccgttggatatgctcctgcagtgtatccagatcaaacggcttggccaggatcggcgcattgcgcgtgatcgggctgttgcagtcgaggatctcctgcgggtaaccgctgataaagatcactttcagctccgggcgcaacagcagcgcaggctcggcgatctgcacaccagagatccctcccggcaagcggtaatcggtgaccatcaggtccaggtgcggcttggtggcgaggatttcgaaggcctgctccccgtcgatcgccttcaacacccgatagcccaggccggccaggtattcacccagcacaaacataatggattcgtcgtcctcgacgatcagaacgacatcttgtgcatcttcactcatgggaagcctttgtccggtcaatagctgcaattacgaccatggggtcacgcagaggttgcgtcgaggtgacgattgagttcatgccgtcgcttgcagcggcaggcacaccctgaacaaggcgccctcgcctatccggctctcgacttcgatggtgccgccatgggccgcaacgatctgttcggaaataaacagccccaggcccaggcccgctgcgacctggctggcggacactcgctcgaattgctggaaaatacgcttctggttgtcttcgctgatcccgattccgtgatcgcgcacctctacgcgggcttcgtcatgctcgctgtacacgcgcacttccaccgggctcttggccccgtagcgcagggcattggtcaacaggttggtgaccacttgctcgatacggaactcatcccagtgcccctctaccgggccgtcggcaaccagcgtcatggatgaatccgccgccgcgacctggggcgcgaagttctgcaccaggctgctgacaagctgtgtcaggtcaaaacgtgccggacggatcgacagtttgccggtacgaatgcgtgacacgtcgagcatgtcttcaatcaggcggatcaggctctggatctgtcgctcgtcccggtcgaccatggcgtgcatcttctccagggtgaacgcggcggcgttgtcccgggccaggtgcatcttgcgcaactgagtttcgaggatcagcccattgagcggcgtacgcacttcgtgggcgacgatagacatgaagtcgtcacgcatacgtacggcctgttccagctcagcctgggtggcctgcaggcgcgtcagcagcagttcctgctcgcgccggctgcgttccaaggcttcgacctgcagcttcatggccttgctttggcggtacaggtcgacgaacacgttgaccttgctcttcaccgcatggatatccaggggtttgtgcaggaagtccacggcgccgctttcgtagcccttgaaggcataattgagttcgcggccggcggcgctgacgaacacaatcgggatgttcttggttttctcggtaccgcgcatcagttcggccagttcgaacccgttcatcccgggcatctgcacgtcgagaatcgccatggcgaactcgtgttccagcaacagggacaaggcctcgtcggcgctcaatgccttgaatacctggcggtcctcgcgcttgatcagcgcttcaagggccagcaggttttccggcagatcgtcgacgatcagcagtttggcctggacagtacttaacatggggaatattccagcgaagccagcagtgagccaatgcggctcaacgtcagaatgtgatcgggtgtgtgcagtgccagggccgcacggggcatgacggcgacacgtgcttcagtgggctcttgcaccacagtggttccgccctgctgcttgacgtgggccaggccacgggcgccgtcctggttggcgccggtcaagaggatggcgagcaagcccgtgccgtaggcatcggcggcggattgaaacaggaagtcgattgccggtcgcgaatggtgcacgcggtcctcctgactcagggacaggctgcgatcatgctccaccgacaggtgataaccaggcccggcgaaatacagcgtgcctggcttgagcacttccttgtcgcgcgcctccaccaccggcatggcaacgcggcgatcaaacacctcggccaactggctgcggcgctcgtcgggcaggtgcagcacggtgatgattggcaggccgaagtctgcaggcaattgggcaaataccgtcagcaacgcctctacgccaccggcggaggcgccgatgacaatagcctctatgccccggacctgtgccgggctggcagcctcttgattcatagctttcggtagatccgttcctgtttgaccagcggttcgaattgcttgccatacgcggagaagtccagggtctccttgctgcccagcaccaggaaaccgcgatgacacagcgactcatggaacaatccaaacgctcgatcttgcaattttttattgaaataaatcagtacgttacggcacgaaattaattgagtttctgagaatacactatcggttgccaggctgtgatcggcgaaggtcacattctcacgcagcgttttatcgaagatcgcgtaatcgtaagccgcagtgtagtagtcggcaaatgaacgttgcccaccggcctgctgatagttggctgtataagcgcgtacgttctccagcgagaagatcccctgctttgccttgtccagcgacgccggattgatatcggtggcgtagatgatcgtacgctccagcaacccctcttcccgcagcaggatggccatggagtagacctcctcgccggtgctgcagccggcgatccagatcttgatcgacgggtaggtcttgagcagcggcaccacttcctggcggatcgcgaggaagtgcgacgggtcgcgaaacatctcgctgaccgggatcgtcaggaactgcagcaactgcatgaacgccgccgggtcgtgcaacacgcgctcctgcaaggcggaaatggtcgcgcaatcaaactgacgcaaggcatgcgccacgcggcgcttgaccgacgccccggagtaatcccggaagtcatagctgtacttgaggtaaatcgcctcgatcaacaggcgcagctcaatatcgctgcttttttccaagaaacttcgctccacttaaatgcgttccatcttcggtagccacacgcggatcagtgagaacaggcgatccaggtcgatcggcttggccaggtagtcgttggaaccggccgcgaggcagcgctcctgatcgtctttcatggccttggccgtcaccgcgatgatcggcagctttttccagcgcgggtcctggcgaatcaaggcagtggcctcgtaaccgtccatttccggcatcatcacgtccatcagcaccaggtcgatatcctcgacttcattgagtttgtcgatggcctcacggccgttacgcccgatgaccactaccgcgcctttgtgctccagggcgctggtcagggcgaagatattgcgcacatcgtcgtccaccagcaggatcttgcgcccctcaaagaccttgtcgcggctgcgggcggtcttgagcatcttctggcgatcatgggacagctgggattcgactttgtgcagaaagagtgtgacctcatccagcaggcgctccggcgagcgggcgcccttgatgatgatcgagcgcgaatacttgcgcagttcggcttcttcatcgcgggtcaggttgcgcccggtgtagacgatcaccggcgggaacgagcagatgtcctcggtggccatgcgcttgagcaactcgttgccgagcatgtccggcagcttgaggtcgatgatcatgcagtcatagacattagtgcgcagcaggtccagggcggcctgagcatagccaacgtcggtgatctcaatgtcatcgtcgccgatcaggcgggcaatgctgtcgcgttgcaggtcatcgtcctccaccagcagcacacgcttgaccttctgggtcagcttggcttccaggcgcgcgaacacgtccttgagctcttcgcgggtggtgggtttgaccgcatagccgatcgcgcccatgtgcatggcggcttccacgcggtcttccacggaaatcacatgcaccgggatgtgccgggtattggcgtgttccttgagacgttgcagcacggtcaacccggaatggtccggcaggcgcatgtccagcaggatggcatcggggacatattcctctgccaggctgtagccttcgtccgcgccgtgggctaccaggcagtggtagcccaattcgtgggccaggtcgaagaggatacgcgcaaagttaggctcatcttccaccaccaggatgcaacgcgtggtaaacggggccttgtcgcggtcatcggcgaagcgcgggatcaggctggcatcggccaccggcagcggcgacaccttggccggagccggtgcgggtgccaccaccacttggcgcggctgctcgatcggtgccacgtcttcccccggctctgcataatgttccggcagtaccagcgtaaaggtgctgcctttgcctggggcactggtcacgctgatatagccacccagcagggccgccaggtcacgggaaatcgacaggcccaggccggtgccgccgtagcggcgattggtggtgccgtcggcctggcggaacgcttcgaagatgctttcctgctggtccggcgcaatgccgatgccggagtcgcgcacggtaaaggcaatcccctcctcagatgcacgcgacaccgacaggctgacctcgccctgttcggtgaacttgaccgcgttggacagcaggttcttgaggatctgctccaggcgctggcggtcggtatacagcatagtcggcgtgccttcctgcacctcgacctggaagccgagcttgcgatcagccgccagcggctcgaacatgccgcgcaggccgtcgacaagccgtgccacgctggagttttccgggcgcatctccagcttgccggcctccaccttggagatatccaggatgtcgttgatcaagttgagcaggtcgttgccggcggaatagatcgattcggcaaacttgacctgttcggcgctgaggttttcctgggggttctcggccagcaacttggccaggatcaacgagctgttcagcggcgtgcgcaactcgtgggacatgttggcgaggaattcagatttgtatttgctggagcgctgcaattcttcggcgcgttcctccagttccagctgggcctggttgagctcgatgttcttgcggtccatggcgtcgcgttgttcggccagggtctcggtctgttcggccagttgctcgttggtctgctccagttcggcctgctgggtttccaggtgggcctgggactccttgaggatgcgcgactgttcttccagctcttcgttggcggtcttgagttcttcctgctgcacttgcagctcttcgttgagctgctgggtctcggccagcacttcctgcaggcgctggcggtaacgcgcggcttcgatggaagtgccgatattgccggcaatcagctccaacagctcttcatcgcgctcttccagcgggcgcaggaagcccagttcgaccacgccattgacccgatcatcatcgctggtgggcatgaccagtacgctgcgcgtcgacccttcgcccaggccggaactgaccttgaagtagtccaccggcacatcatccaggcgaatcaggcgatccagctgggccgcctggccgacgatgccttcgtcgctgtagatcgcttgttcccgctgttcctgttcgcgggagaaaccataggtggccacgcgcttgagaccgccgtgttcttcacgcacatacagcgccgcaacggcggagcccatgtactgggcaaagaactgcaggatattgcgcccgagcatattcagggtcagttggccgagcacctgttcggccagttcggtctggccgtttcgcaaccaggcttgttgctcaaggcgtcgcgcaatcttctgttgtgacgcgaggtttgaactgtaactatttgataatgaaacaagatttttacgaccgatgtaggccagaaagccactcaatcccaatacaaatgccaagtacagggtgacgctgatcaccgtggtgcgggtgacgtcttcattgcgggtgatgcgaaactgctgctccatcgccaccgcgtcgtcgtattccttgcggatttcatcggtcaggcgcttgccgcggccggccttgactgcgccgcggtagtcaccactgttgcgctgcatatcaatcatcgactgggcgtagttgttccactcggcctgcagggcttccaggcgcttgaggcgatccacctgctgtgggttgtccgccaccagctcctgcaggttacgcaggtcggcgatgatgcgcggcttggccacttcatacgggtcgaggaaatgctcgtcgccggtgatcaggaagccacgcatgccggtttccaggtccacggtcagcttggacgattcattgaggttattgataacccggtcggtgtgttcaacccattggatcaccgacaacaggtaagtgatcaggcacacgaaaaacaccgcgctgagcacgcccacacccaggggcaatgcaacatttcggctcagcagattacgaaagctcttttcatcgacggacgaagcgggagtcatgggcatgccttggccaagtgcagaaaacccaggagtttgccccaaacttggggttgaacgctatttttatgccaaatactgtcaggtgactcactgccgattgtgagaccccacgtcaaatcaagccactgttttggctgcttacattagtgaacgcggaggcacaggaacgcaggtcgcagggcattgcactcaatgatgcgccttgaaaaaggcagccttgcgcaagcaaatgcgcggataacgtccaacttcaaagggtatccagccatgaccagtctctacgcggtgtccacatcagccctcaacccacccacgcatgcggccaatcaactctatcgactgtcccaacccacctcgtccgaaagcgtcgcagaacaacaggccaacccggcgccacaaccgacttctctcacaacagccgacctctccaacaaaaccctgattggtaatgcccgcaacctgcataccctgtcgcaagcgctgcacaaaattgccaggacactgggacacaacgcgtctcccccggcggtgctgaacgcactcaagaccaccgcaatggacatccacccgcattcatcctttccaacgcagcctgacacccttgtcacactggagagcttcatccgcggcattggcctgggtctacccaccaaccatttttccttgaccgcgttagcggatgccgtcagtgagagagcggtggcgaacccgtttgggaacttcgggggggcactgtcctggcctgtacctttgagtactgacgatcagcgaacgctgcaggcagcggctctccaatacatcaaggatcacgcggaatcaccggagacgggccacagcctgggaatccttgagttgctcaatgacaacaaacccttgacggatgaggccaaggcagaccccatcaaagcgttggagtcgatcctgaacagcccccgagggcaggcgtttggtcgggcaatgcaagcgcatatgaagggtatcgacaccgccaccagcgcccatgactacgccctgccggcgatctacctggccctgaaccccgaagctattaccaacccgcagcgaaaaagggttgaaccgcacctttggggcgctagcccgtcagcggtggtcgatgcgcaggtcaaacccctgatagacgatggccgggttagcccggagatggccgacgttgccgcaacgataatattcggactgacagcgcctgcgtttaaggtaaaaggccttcccgacaatatcacttatggcagcccggcctcggcccgcctgcagatcgcagtggatatccaggaagcgctgtcacccgggtcggcgatgaccatgggcttcgacgaaatcatgatcaaggccgaaaaggccgcccaggtcgatccagcggtaaccgagttcgctcagaaaaccgcactggtcgattggggggttgtcaacggcctgatcgagagaaaggatgacaaacactacacggacctggaactggatgagctgagaacccaatacaaccgcgagttcgcagagcagatcgacgcacagacgttagccaatgctgaaatacccagccgtaaggacatcgccctcgccaaactgaaagaacgttttggtgaaggaattccgtttgaaaaacccctgttgaaactccagacatccggccatcaatcccccgcaatgccgatctacaatccaaacttgcggcctgaagggtatttttcgatgctcgacatcgcgatgatggaaaaccgtggttacacctggacgaccgctgacccgcgtatccccctcgccgcgatcaacgaaaatcctgttctcggtgtgaatgcagcattcaagcaacaattcgacgaggctattgtttcgcgaaagaaaggtctgagtgcgaccgtcaggcacctcatatccaaactccccttggatcaacgcaaagacttggaatatggaaagctgcgcttctttcatgattcggcgtacagaataaatttcatagacaaaacactgctacacaaatacctcaccttttcgataaaaaccgagcgtgacggcgtgtcgtctgtttatgaggtcgacatcaagaaaggcaccatcaccaagcaacgcagcggcaaaaattacgatgagagcacctatggcccaggctcacggcaaattcatacaaccgagttccggccgtcccgctatagccaggcaaaccagaaggaaaacacgggcgacagcgcagtcacgccaaaaagcttcagcagcgaccgcagccaatacattgccgatgcgttcgttgagcacctggatatcgataacgccgatgttgtgaaagcggccaaaggctctacgcagttggacaaacagttcgaagcacaggatcgcgcggccaactttttcctggacctgatcccgttcagatcggccattgtcaacttcataaacggcaactatgtggcgggcgctcttgatctgacgatggatgtcatggggttcctgaccgctggcgcagcgactgcggccaagctggtcaaggtgggggcgatcgccggctctgctgccacaaagctggccaagggcgcgcgcgttattggagcggcgaccctcagtgcattcaacccgctggggggcgcagacgacctggtatttggcggcgcaaggctactgggcaaaagccctcgggcactggagaaaggcatacaaatgctacgtggcacatcagacagttatgggctgctgaaaaacctcagccagcagtacgacatagccgcaataggcagctacaaggtcggcgaaacaaagatccagacggctgccgtattcaacgatggacaatggtaccgctacgacccgatcaaggctcaaccctacggagccccgctggagaacttcacgccctctgtcgcggcctccgcgggggaaatcaaagggttgactgagtcgaggagcatcgagtggttcaccagttggtggagttcctcccgtcccgacgccaaccccaatttcgcaaaggaattcgaggacttgcggttaagcgccttgaaaacggacgccgaaggattcaaccatggttataacagccagacaccgccgtcgattaccgggtactcaacatccctgagcgttgaacagctcaagacactttcactgcaagccggtccaagtgcgcaacagttgggaagcctgattcgccgtatcgaagacttggaagaactgccgaatacgttctataccaaaatggaaaacctcaaaacgctggatgcggacagtttcaagcagggttacaagtacggaacgcccgactcgataaaggggtacaaggaggggttgagagtccctgaactccaggagctggctttgcaacgtggattgacgacgcaacaaatgggctgtctgtaccgacaggttgaaaagcgtgcgatcacgctcaacctgtccctggccaaaaaattcggcgataacatcaaggccgcgggcggagcgttcgtcccgatgccacaaggtttgtacctcagccaagtcagtcctatctcgggagggcagtgcgcggtgtttgctaactcgatggcctatgccattcaggagggcaagcaaaccacgctgttggagaatcttttcacggtaatggctcatcccgagcatcccgccacccagacatttcaaaagactatgcaaagtttccaggccaagctcaggcatgactttcatgtaggccaatacaaacagcagcggacggctgcgcaaatcatcgagcaactggcgaatgccaacacgtcgacccgcctgatgataggtaatacaacacacggtattaccgcaggcgttgtcgtaaagggcggcgaaaaagaatggttctacttcgatcccaacttcgggttggcaacattcaagtccgaggcgtctatgcgcgccggtgtggaaagtgcaatgagcaccggttcaacgagcgcattattccgtccgaatccggggaccttgacctattctgtctcggacttcagtgaattgaacctgatgaacaccgtcggcagcatcaacggcgtgcatgacctagtggccatcccgctatcaatttcctcccccagattggcctcaagtgtcgcctgacgtttgacggggagtaccggcatcatccgattcctggagatgccgcagtcccttgcgagcccggtagaaacccgaccacagactcatacgggacattccttcccaacaccggcacaataccgacctcggtgagggaacttgccgagatcgccgcgactcattagaggatggcctttccaccgctcacggccaatcctttcactctcgggaatttatttatgtccgccaccgcctccaccatccttgtcgtcgaagacgatgccatcgtgcgcatgcttatcgtcgacgtcctggaggagttggaattcaacgtgctggaggccggcgctgctgaagaagcgctggcactggtgcaaaacactggccaagtgatcgacctgatgatgaccgatgtcggcttgccggacatggacggcaagcaactggctgccaaggtccgcgaactgcgtgcggacctgccgattctgttcgccagcggttatgcggaaaacattgacgtgccagccggcatgcaagtgatcgccaagccgttctcgatcgatcaattacgcgacaaagtcaaatcgatgctgcccgcactttaatttcgacctgtacacggtgccgcctgcatgggcggcatttttgcgtcaggtgttcagagattaacgtgaccttcggtcaataacatcggaaactcaacgctattcagacgctaccctacaaaacgcactcaggaaggacgcaacaacatgattggaaaaccgacgcgcctgctgttggcgagcctctcgatactcatgagtaccggcgcctgggccgacttcacggcaactccggccgaagcccgggccattgccaaggaagcctacctgtatgggtttccggtggtggacatgtacaagacgctctatacccaggccgttgacaaaggcggtgccaacttcaaggcgccgttcaaccagatcggcaataccgcgcaagtgttcacgcccaaggacacggccttcgtcacgcccaacgccgacacgccctactcgttcgtctggatggacctgcgccgcgaaccgctggtgctgaccctgccctggatcgaagacgaccgctactactcggtgcagttgatcgacctttatacgcagaacttcgcttacctgggcacccgcagcactggtaacaacggcggccactacatgatcgccggccccgactggaagggtcagcagccggtgaatgtcgaccgcgtgatctacagcgaaagcaatattgcctacgccctgtaccgcacgcagttgtttgatgaaaaggacctgggcaaggtcaagcagatccaggccggctataaagtgcagccactgagcagctacgtgaaacaacccgcgccagccaaggcggccaaggtcgaatggccaaagcccacggcgaccatgaccgaaggcccgcaattgtttcgctacctgaacttcatgctggccttcgccgcgccgcaggacagcgaaaaagagctgctggcccgctttgccaagatcggtatcgccccgggcgcgccgttcaaggtcaaggagctgaccaccgaacagcgcaaggccctggatgaaggcattgccgacgcccatgccgaatttgccgcgttcaagaaagacaaagtcgacactcaccagatcaccagcggtgatctgttcggcagccgcgaccacctgaacaacaattacctgtaccgctatgccggcgccaacatgggcattttcggtaactcctccgacgaagccacctacatgagctacttcgtcgacagcgaaggcaaacccgccaacggcgcacgccacagctacaccgtgcattttgccaaggaccaactgccgccggccgatgcgttctggtcgctgaccatgtacgacgccaagaccaagcttttggtgcccaaccacaagaagcgctacctgatcaattcgcggatgctgcccaacctcaagcgtgacgccgatggcggcctgacattggccttgcagcaccacgagccaccgaaggccgagcaaagcaactggttgccggcgccaccgggtccgttctacgcggtattgcgcatttacctgcccaagcctgaggtgggtaacggccaatggaagctgccgccgttgacgccgctcaagtaacgccacgcgcccggtcgcaacaatggtgagggcactgcagccctcacctctcgcaagttctagcgcgtaagtttcacgtacgactgatgcaggtccgacgcccagccatcaatcacgcttttcacgtcaccggccttcatcacctgcgaatcgttggacagcggcttgcctgtgcctttgcgcaccacctgggcgagcaccttgccattggcgccatcgaggaactgcgcctcggtgcccagggtggtttcctgatcacggatcccggtgccggtgcttaccgccgccacgacgaaggccaccggaatatactcatagggtttgaggccttcggtcttgctgctcacggcggtgattgctgcacgcaccacgatcacgcctggacctggcgcattggccaggggcagggatttttccagctcacgcttgagtgcctggttgtagtaggtgttgatgccgttgagggtggttagcggaattttcgcggtggcctggggcttagggtagaactgggtcggttcgacgtacaccgcgtgatagcggctcagatccagctcgggatcgacccagcgcatcacctcggcccccgatggagacttggcttccttgagccggctgtagtccgagagaaagccggaatactcatccggcgcggtgatcttgctggcacaccccgccagcccgagcgaagcgatgcacaacgtgcagagcaaatgcctaagtgtcatgtttgaactccctggcggtcgacgttggaacactgagttgtaggtatagccaatcctggcaaaataaccctgttcccatcattcgacgtttcagctgcgttcgcgggggatcaggctttgcaactgcgaggccaggaagttggcgtcgaaaccaaaggtgtccgggtctttgaggccattggtcttcttccacaaccagtcgttcttatccacgggtaataccaacgacacactgccgtgacgtgccgcggtcaggcccatgaccgacacagagatcaagccacccgcgcccatgacatccggcacgaactccaccggtttgccagtgatctgtacggtcagtttctcggtcttgaatgtcgaggtctccaccggcacgctcgggccgctggctacgtaagcttcacggtggacttcaagcaaccccactgtcttcaccggctcaagccactgctcgatctgcccgaacagctcatcgagcttctgcgcccaacgggccgactgcacgtcgaactgctgcttcttgtgcgcttcgctgtcggcgtaatgacgaagcatctcgcccagttgctgtacatcgtccattgcggagttccttgggtgagcctggttgcgaagcctgatcatggcagatgcagccattcgacgtacggcttaaaactgatccgcaacaatgaggtttttctgagcctgttttgttttacccatgcttcctacagtgccgccacttggaaccgtgggaggactgagcatgagcagcacaacaatcggacaggcgtataactataaagtcgtccgccaattcgttatcgccacgatcgcctggggcgtggtgggcatggccatgggcgtgtggattgcctcgcaactggtctggcccgagatgaatctcgatctaccctggaccacttttggtcggttacgccccctgcacaccagcctggtgattttcggttttgccggcagcgcgcagtttgccgccagctattacgcggtacagcgtacttgccaggtgcggctgttttccaaccgcctcgcggcgtttaccttttggggttggcagtcggtgatcgtgatcatgctggtcagcttgccgctgggttacaccaccaccaaggagtacgccgagatcgaattctccggcgcggtgtggatggcagtggtctgggtggcgtacgccattgtgtttttcaccaccgtggtgcggcgcaaaacccggcacatctacgtgggcaactggttcttcggcgcgtttattctggtgattgccatgctgcatgtggtcaaccacctggcgatcccggtggactggttcaagtcctacccggtgtattccggggcgaccgatgccatggtgcagtggtggtatgggcataacgccgtggggtttttcctgactaccggtttcctgggcatgatgtattacttcgtgccgaaacaggtcggacgcccggtgtactcctatcgtttatccatcgtgcacttctgggcgctgatcaccctgtacatctgggccggtccgcaccatttgcactacaccgccctgcccgactgggcgcagtcactgggcatggccatgtcgctgatcctgctggcgccgagttggggtgggatgatcaacggcatgatgaccttgtccggcgcctggcatcagttgcgcaccgacccgatcctgcgattcctggtgctgtccctggcgttctacggcatgtcgacgttcgaggggccgatgatggcgatcaagaccgtcaacgccctctcccactacaccgactggaccatcggccacgtacacgccggagccctgggctgggtggcgatgatcaccttcggtgcgctgtatcacatgattcccaaggtgttcggccgcgagcagatgcacagcgtggggctgatcaacctgcacttctggctggccaccattggcaccgtgctctacatcgcgtcaatgtgggtcaacggcattacccagggcttgatgtggcgcgcggtcaacgatgacggcaccctcacctattcgtttgtcgaggccttgcaggccagccacccggggtttgtggtgcggtttgccggtggtgtgttctttctgaccggtatgctgctgatggcctacaacacctggcgcacggtgcgtgtcgcggacctgaaagtggcgcagcttgatgcgcggatcgcctgagatgtggggcctgctgatggtggtatgcctgtatggcgcggtggagtattgcttgcgcggtcaatcggacaaaagcctggacgacgccagcctgatgcccttcgccgatgacccggaagtggcacggcgagtggagttggcgaccggcaagcaggtgaacgcagtggcaccggaagaggccaaacccgggtggaccaacctggacatgtgaaactgcaccggtcatttcgtgggcaactgcgtatgactaatcaatggtcgatgggtaaggtgaagcgactttccttgtcaggagcatcgcatgcgcaccatcggccttatcggcggcatgagctgggagtccagcgccgagtactatcgcatcatcaaccaacgcgtacgcgaccagctcggcccgctgcgctcggcgcaactgttgatgtacagcgtggacttcggcccggtggaacaggcgcaacatgccgggcgctgggatgacaccgcactgatcctcgaagacgccgcgcgccgtttgcaagccggtggcgccgactgtgtggtgctgtgtaccaacaccatgcatttggtggcgccgcgtatcgaggcggcggtgtcgattccgttcctgcatatcgccgacgcggcgggtgcggctgccgtggaaggcggtacgctgacggttggtctgctcggcaccgcgtttaccatggagcaggatttcctcaagtcgcgcctggccgcccaaggcctgaccgtgctggtgccggaggccgacgagcgtcaggccgtgcacaggatcatctatgaggagttgtgcgtcggcgtgatcagcgaagcgtcacgcaaggtctaccaaggtgtgatcaagtccctggccgcacgcggcgcccaggccatcatcctcggctgcacggaaatcgggctgctgatcaagcccgaacacagcgagctgccgctgctggacaccaccgagctgcatgcgcaggctgcggtggcgttcgctttgcagggctaagccgactggcgcaggcgcgccatgctcacggtgtcgacaaaccggccgtcacgcagggcgtaatcacgcaatacgccttcgacctcaaagccgaacttgcgatacaaccgctgcgccgactcgttgtcggcgtacaccgtgagctccacccgatgcaggttcatccagttgtcggccacgtccagcgcggccgtcaacagccgcgaaccgactcccttgccctgccacgccgttgccacgcccatgccgaacgaaccgacatgggcctggcgcacacgcaggtactgttccaggcccagctggccgatcacctcaccgccatgcatcgctaccagttgcaggcgccgctcgttgtccatcaccaggcgtttgcgccacatctcgaccgactggaaaggcatttgcagcacctgacggcacacggccggttcgttgtagagcgctgcgacgccttcaaggtgggcctcggtgaagcgctggatcacgatatggggttcaggcgtgtgcatggtgtttcatcctttgaaagacacgtggtcgaccagtgtaggggcgacattaagccgatggctagggggctggcacggttgaccacaacgatggccagtcaccgtagccgaccccggtgcaacgcggcatccggtggaactcactgagctgaaagcgcttgccgtcgaacacccaagtggccccgccgccgcagtcaccgatgccacgctgcttgtagaaataactcagggacccggaagcctcgtcatagccgaccgcgccttgcaatgcggcgtcttccaagggcagcggctgcaggtccatcagggtttccgtatagggcgcctggcgctcacggctgctgacattgaactcgcagttgtaggccgcgcagtcataacgtgtcacggtcatggcctggcgcgccgtcagcgcccctgcttttgcctcgggctccccctcttccggcgtgacggcctgcaaggcggcagccaccagcccggcctgctcctgcgcggtcaacggcggtgccggcgaaaacttgcgcagtaccggcgttggcgcccgtggcggcacctcgctggccgcgcccttgccgggtcgagccagggccgtcaggttgtccacgcgaccctgcactgcatccatcaacagcagcgcagcactcaacccgctcagcgatacatgcgcctgttcatcacccggcaactgcaggcgctggccattgcgcagacgctgcaaccagcgccgcgcccctgcgtcatcaatcaccccatacgaatgcacctcgggatcaccgccctggtcatccagttcaacgtgcaattcccgcgtcagctccaggcccaggggctggccgtccagcagcaaggtggaaaggtccacctcctggcctcgataatcaaagcgcagacgcggatacccttgcggacccgcctgatgccagatgtgcaacgtcaatgagctatagtcctcttcatccacgccgctgggtgcgctgagggcgtgacaattgcgcaggttgtcgcaaccgaccacccactgcttgatctcacgcagcagcggtaccgcttcggaggggggttgggcgaagaccggggtggtggcgccggtgagcaacagggccaggaatgcggggcgcaacatggggactctccgtgtcgaaaaggcgcggattgtcccatgttcggggtttgtggcggtagctgtcagggcctggcttggccacgaactcgggctgcgcgcttttccaggtgttgcgcgtgacgctcggcttgctgcttgagggccaggcagtactcaggcaggcaatgttgagcgtctggttttacgacgtcatcggccagacgccgagcggttgcggcagaaataggagtgccgcgtggtttcaaccggcctttgatgatggcagcgcgatcattgaccagcgttggatggttgagtttaagtacttcgacggtggcaatcgcttcgggagtcaggccctctacataaccatcactggagtatcgaaactgccgctcgatattggctgtcagcggggaaacaaacggctttgtcaccgtgttgtaatcggccttttccaccgcgccgtagccgcaagcgactttgctttgactggatggatagcaggcgaccaagtttttgtaagcaatgttgctgtcagcctgttggtgtttttgcggaatgacatgctcaatatggcaactgaactgcgtgccttgatctcgagcctgacactcgaccgctgtcggtagccgtcgcaaggtataggcgcataaatgaaactgttccttcaggagcgcctggcgaaccgcttcgcttgggaaggtacttcccttgccgtagaaaagattgtggggagtgtcgcgatttacccttcgccattcaatcagtcctcgtggttcagagccttttctgatcgacctcacgcttcgccctcctctagcgagcgcaaggagtcaatggttgcttgagcctcaagaacatcgggaattttcccgactctccggtgcaactgcgttaaatatttttgggcggagtcaaggttatcatcgtcaagttcccgatagacctttctgagttgttggctcacatcttggttttgggctaatccccccatgaactcttctataacttcaccactgcgaaggccaagtgagcgctctggatgacctaggtattcaccggttcttaacagcatcacggacgctgctgggagttctcctagtatttgtggcgaatgggtcgtgatgatgaattggcagttggggaatgtcttttcaagatttgcaacaacagtgcgctgccagcctggatggaggtgaagatccaattcgtcgatcagtacaacacctctcccttccagtggatcaggcacctcgcggttgagcagtgtcaaccttcgagccaaatcacctaccattgcgagcaagcacttctcgccatcggaaagctgcaagacgttgaattcgagtttgcctttaagaacagtcattcttagagttggtttacgacgtactctaatatctttgaatccggtgaacgtttctatagcccgtcgaactgctgaaagctcgtgatcccgaaatcctgggaggtcacggctgatttcattttccaggtcttcctggttgcgaaaccagatgaaaaacctcttgaagtcagccccgccgtggccaagggcgtcgtcgtagccttcctcaatagtgttgatcaagcgttcacgaacacgtaacggtacatccagaacagcccgatgaacgtcgtagtaaacggcaagaggcagttgaacggacttgtctcctacgagctcataatgaattgcattgatctcgaacgatgcagcagcgttcttcagcaaagacaaatcactactgcgttctttagggtgctttccagactttcgatttagagctattgcccaatcgatgtcgcgctcgtcctggaatccgacaatgacctttagccttgtgtattctgcccctgccttgatgtcatcttttgacattgctctggacttcgacgcctgaccgacgatccgcgccgtcaaattcgaaagcgtaatcgccaacgcatccagaatcgaagacttgcccaccccattgacgcccaccaaagcgacagtctgcttaccctcgaaatcgagttccatcttctcgataccgcggaaattgacgagggtaaaacgcttgatctgcatgatcggcttccaacgtgcctggccgggtcagccagtcttcaaagtaagcacggatcatagtaattatcgactgatctgtcacggcgctgacggtggcagctatcatcgctgcgttgctacgcgccacacccgtgcaatatcggctgcccgttcgctgagcagacgcggcgcctcagcgcaggcctgttccaggctcatcggaccgctaggcaaggcaaatgccgcatccacgccatgggcatacatctgctcgtagccctcacccaaggtgccggcgatcacaataacgggcacgttgtgctgtcgggcgatgcgcgccacgccgaacggggttttgccgcgcagggtctgggcgtcgaaacggccttcgccggtgatcaccaggtcggcgccgcgtacggcggcgtccaggccaaccagttcggccactacctctacgccagcgcggaactgcgcgcccaggaaggccttggccgcaaagcccaagccacctgcggcgccgctgccgggttcgtcgcgcacatctttggatagcacgttggcgcaatgatcggcgaagtggccaagggcggcgtcgagttgttggacttgctcgggattcgcgcctttttgcgggccgaaaatcgccgaggcgccatgggggccgcacagcgggttgttgacgtctgcggcgatttcaaagcgtacctgcgcaaggcgtgggtcaagctgttccaggctgacccgcgccaggcgggccagggccaggccaccaggtgccagcggttggtcgtcggcgtcgaacagttgcacaccgagtgcctgcatcgcgccagcgccgccatcgttggtggcactgccgccaatcgccaggatgatgcgttcagcgccggcatccagtgcggcgcggatcagttcgccggtgccatgggtggtggtggtgcatgcgtcgcgcaggcccgacgacaccaattgcaggccgctggcctcggccatttcgatgattgcggtgtggctgtcggccaaccagccccaacgcgcctcaaccgctgtaccaagcggaccgcgcacgctgtggcggcgcaattggcccttgcacgccgccagcaccgcatccactgtaccttcaccaccgtccgccattgggcattggaccaactcggcatcgggccacacctgggtcagcccttcggcaatggcctgggcgacgccttcggcactcaggctgtccttgaacgagtcgggggcgatgatgattttcatgggctttctccggtttttatgacgcccatgctgccagttgccaccgccgctgacgccggtccgatgcacaactgcggcggtgctttgttgttcattccgacaaaggctggggcagcagctgaacgccgaggtacagggcgagcatgccgtccagggtcaacgggtcgacgccactgagctcggcaatgcgctccatgcggtagcgcaggctgttgcggtgaatacccaaggcgtcggcacaggcctggctttgcccgtcgtgttcgcaccaactgcgcaaggtggccagcagttgaccattgccgtccttggccaacactttgcgcagcgggttgagcagttcatcgagggcgtcgtcgttgcgatggcgccagagcatcaccggcaggcgatagcggttgagcgtgagcagccgtgactgcggcagcacatcgcgaccataggcgagcaaatcaccgacgcgccgatagcagcggcgcagccccgccagcccatccgcttgcccgcccacggcgacgcgcaggatgctccagccaaggccttcgagtttttccagcaggcgtgggttgtcgaccggcaccgtggccggccggcaccacaacaatgaatactgcgccgagctgacgcaccagctgtccggataacgcgaggtcagccaggcactcaaggcctctgccgattgccccgcgccgagttcgaacagatacggcgtgcgcgccatctgcggcttgagccccagttgctgggcttcgtccaccagccgcggcgagtcgccgctttctgccagcagcagagccagcaggtcatcgcaacgctggcgccgccactgttgctcggcctgctggtggcggtggctcaccagcatctcggcggtcatacgcaccagttcggcgtaggtgcgcaggccctccggctcgccagtgatgcccagcacaccgatcaggcggccgtcatgcagcagcggcaggttgatgcccggttgcacgcccttgaggtgcttggcggtctggccatcgatttccaccacgcggccattggcgagcaccagttgcgcgccttcatggcgggtgttgatacgttcgggttcgccgctgccgagaatcaggccctggctgtccatgacgttgacgttgtggggcaggatcgccatggtccgatcgacgatatcctgcgccaggtcatgatccagctcgaacatgcggctaaattccttgaaaggggtggttgttcatcggcacagcgcaaagcagggttcgctgtgcgcaagcacaaagacagcggcccgccggagggccgagactcttcaggcgatcaacgttaccctcgcatcgcgaaaaatcataataaagagagactcccatgtcacagagcgccgcagccacactggccaccgatgacgataaaaacgccatctacaagcgcattaccctgcgcctgatccccttcatcttcatctgctatctgttcaactacctcgaccgggtaaacgtcggctttgccaagttgcagatgctcgacgcgttgaaattcagcgaaaccgtgtacggcctcggtgccgggatcttctttatcggctacgtgctgtgcggcgtgccgagcaacctggcgttgaccaaattcggtccacgccgctggattgcgttgatgatgatcgtctggggcacgctgtccacctgcctgctgttcgtcaccacgccgacgcacttctacaccctgcgcctgttcaccggtgccgctgaagcgggcttcttccccggcgtggtgctgtacctctcgcagtggttcccgaccttccgccgtgggcggatcatggcgctgttcatgtcggccattccggtctccggtttgctcggcagcccgttctccggctggatcctcaaccactttgctgccggccaaggcggccttgccggctggcagtggatgttcctgctgcaaggtatcccgaccgtgatcctgggcgccctcgcctacttcctgctcagcgacagctttgcccacgccaagtggctcaagccccacgaacgcgcggtgctggaagccgaccaggcgaccgacctggccaacaagccgaaaaccaccagcgattcgctggccgaagtgttcaagaaccccgcaatctgggcgttcggtttgatctacttctgcatccagagcggcgtgtacgccatcaatttctggttgccgtcgattatcaagaacctggggttcagcgataacctggtgatcggctggctcagtgcaatcccctacttgctggcagcggtattcatgctgctggtgggtcgctccgccgacttgcgcaaggagcgccgctggcacttggtggtaccgatgttgatgggcgctattggcctggtgattgcggtgaacttcgccacgacaccggcgattgcgatcctcggcctgaccatcgcgaccatgggtgcgctgaccggcctaccgatgttctggccggtgcccaccgccatgctcagtgcgggcgcggcggcaggcggcctggcgttgatcaactccatgggccagatggccggcttcctcagcccctacatcgtgggctttgtgaaggatgccaccgggtccacggatgtggcgctgtacttactggcggcggtgattgtcgccggtagcgtattggcgttgcggatgacgcgtaccctgaaggcttaggtcgctgcggcaatcagagcagaccgccgccgtcgatatcgatcacggcgccggtcataaagccattttccatggccagcacataccccgccgccacttcctctgcttgccctactcgcccgacaggcaacgcggcgccggccttggcaaacatcgccaggcgctgctcctctgcaaggccggcatacgccggtgtatcgatcacccctgggctgaccacgttgacccggcgcggtgccaactccttcgccaactgtttacccagcgcttcggtggcggcgttgatgccggtcttgatgaactggcccggcgccaatttacgtcccagttgcccggaggtcaggctgatgctgccctgctcatccaggaatggcagtgccagttggatcgcccgcagcgagccccagagttttacgttgaagttgtcctgggcctcgctcagatcggtttcgatcaaggtcttggcacgcacggtgggccctgaggtgtagaccaggtggtcgaaccgccccacgcgttcgaacaagtgttgcaaggaccctgcgtcagtgacgtccaccggttcgctgcgcaggccgtttaccacgccgctggtcaagcgccgcccggccagtaccacctgcgccccgcgcgcagcagcggccttggccacggccgcgccaattccgctgctgccgccaatcacgatgacggttttgccgttgagggaagaagtcatggggaaattcctgattgagaaagtgagggttcatcttcccagcttggcaatcgacgaaaaatcccggtaaaacgacaagatctttaaaggatttttacaaatgagctcgaccctcgaccttgaagtcttcgtgcgcaccgccgacaccggcagcctttctgccgccgcccgcagcctcggcttgaccccggccgccgccagcattgccctcaagcgcctggaaacccgcctgggcattcgcctgctggcacgttccacccgcagcatgcgcttgaccgaagaaggtcgccgctacctggagagcgtgcgcgtcgcactggaggcgctgtccgagggcgagcaggcgatcaagcagcagggccagagcctcagtggcctgctgcaactggcggcgccctcggacttcgggcgcaatgtgctattgggctggctggatgcgttcaagctcgaacacccgaatatccgcctgcaattgctgctcaacgacaccaatgccgacctgttccgcgacaccgtggacattgccctgcgctttggcgtgccccgggactccagcctggtggcgctgccagtggtgcccgaccaccaccgcatcgcctgtgccagcccggattacctggcgcgtcacggcacgccccgggttccgagcgatttagcgcagcacaacacgctgcgctacatgcgtcagggccgcgccaacagcatctggtatttccgccagggcgcggtgttgcaggaggtcgaggtgtcgggcgattacttgagcgatgacggtgaaatcgtgcggcgctgggcgttggccggtcacggcatcgcctacaaagccaacctggatatcgcccaggacatccaggccggacggctggtgccgttgctgcctgactggcaaggcgagccgacgccgttcaacctgatgtgccctcaccgtcttcaagtatcggaacgggtgaaggtgctgcatcgttttttacaagcgcgctgcaagaccctgctgagtccatgaagaaacgcgcccagggcttgtcccagaacggccgagtctggtattgcatggggtacgttcccccgccttgaggagttatccatgatttaccgcacattgggccagtccgggttgaaggtcagcgccttgaccctgggcaccatgatgtttggcgaacagaccaacaccgaggactcgctgcgcatcatcgacaaggcctgggaccagggcatcaattttatcgacacggcagacgtctacaccggcggacgttccgaggaaatcgtcggcgaagccatcgtgcgcaatcgccaggactgggtggtggcgtccaaggtcggcatcggcccgctggacggtttgcccaaccgcagcggcttgagccgcaagcgcatattcaacgcgctggacgccagcctgacccggctagataccgattacctggacatctactacctgcaccgcgaagaccacaacacgccgctggaagtgacggtgtcagcgattggcgacctgatccgccagggcaagatccgctactggggcttgtcgaactatcgcggttggcgcattgccgaggtgattcgcgtggccgaacgcctgggtgtcgacaagccgatcatcagccagccgctgtacaacatcgtcaaccgccaggccgaagtcgagcagatcaccgcggcggccgcttacggcctgggtgtggtgccttacagcccattggcccgtggcgtgctcagtggcaaatacgcgccggacgtcactcccgaggccggcagccgtgcggcgcgccaggacaaacgcatcctggaaaccgaatggcgcgtggaatcgctgcgcatcgcccagcagatccagcaatacacccaagggcgtggcgtggggatcgtggagtttgcgattgcctgggtattgaacaattcggcggtgagctcggcgattgtcggaccgcgcaccgaggcgcaatgggatgcctaccttggggcgttggaggtgaagatcacggcggaggatgaagcgttcatcgattcgctggtgacgccggggcattcgtcgacgccggggttcaatgatgtcgggcattttgtgtcggggcgcatcgcccgcggttattgagctagaccgttcattgtggcgagcgggctaactgtggcgagcgggcttgccccgcgttgggttgcgtagcagccccaaaaagctgggagcgctgcgcactccaacgcggggcaagcccgctcgccacagttagcccgcccccgcagcggactaacgcgaaattttgctgaaaaatgccccaaaacagcgcaaccctctcgcggtaaaagcaccataatcccctgttcaaatccccctcttttcgtatcaatggtttttcgcgaggacagcgtgtctaaaggtgtcgtgttatcggtcttggcctcggtgttgtttgccgtgatgtattacttcacgtcgctgctcacacccttgagcggactggaaattttcggctggcgcatgttgctcaccgtgccgtgcatgacggtgttcatgatggtcagtggcgaatggcgacgagtgtgggaactgctgcggatgctggctgccaggcccgcattgattggtggtgtgctggtgtcttccgccctgctgggcgtgcagctgtggctgttcatgtgggcaccgctgaatgggcgtagcctggatgtatcggtgggttacttcctgttgccgctgaccatggtcctgaccggccgcctggtatggggcgaacagttgtcgtacttgcaacagatcgctgtcttttttgcaggcctgggggtgctcaacgagttgtaccaggctggtgggttttcctgggccacgctggtggtgatcatcggctacccggtctatttcatcgtgcgcaagtacctcaagaccgaccatttgggtgggctctggctggacatggcgttgatgctgccggtggcctggtggtttgtgcaaagcggcgagcaaggctttgcggtgctggatgcgcaccccaagctgtacgcgctgattccgatgctgggcctgatcagcgcctcggcgctggtgagctacatcattgccagccgcttgctggcgttcagcctgttcggcttgctcagctacgttgagccggtgctcttgctgggcgtggcgttgatcctgggtgaagggatcaagggcggcgaatggttgacctatatcccgatctggctggcggtgatggtgctggtattcgagggcttcaaacacctggtacgccagcgtaaagcctgatcggcaggcagcaaaaagcccggccaggttaccctcggccgggcttttttgtgtgcgtcagtcggtggtcaatacaccacgacgcacctggtcgcgttcgatcgactcgaacagcgccttgaagttgccctcaccaaacccatcatcgcccttgcgctggatgaattcgaagaacaccggccccatcaaggtttccgagaagatctgcagcagcaggcgcttgtcgccttcaaccgaggaaccgtccagcagaatgccgcgtgcctgcagctgatccaccggctcgccgtggttcggcaagcggccttcgagcatttcgtagtaggtgtccggcggcgcggtcatgaagcgcatgccaatcttcttcagcgcgtcccaggtcttgaccaggtcgtcggtgaggaacgccacgtgctggatgccctcgccgttgaactgcatcaggaactcttcgatctgcccggcgcccttggacgactcttcgttcagcgggatgcggatcatgccatccggcgcgctcatggccttggacgtcaggccggtgtactcgcccttgatatcgaagtaacgcgcttcacggaagttgaacagcttctcgtagaagttcgcccaatagaccatgcgaccgcgatagacgttgtgggtcaggtggtcgatgaccttcaggccggcgcccaccgggttgcgctccactccgtcgaggtagacgaagtcgatatcgtaaatcgaactgccttcgccgaaacggtcgatcaggtacagcggcgcgccgccgatgcccttgatggctggcaggttcagttccatcgggccggtttcgatatggatcggctgggcgcccagttccagggcgcggttgtaggctttttgcgagtccttgacgcggaacgccatgccgcacaccgacggaccatgttcggccgcgaagtaggaggcaatgctgttgggttcgttgttgaggatcaggttgatctcgccctggcggtacaggtgcacgttcttggaacggtgggtcgcaaccttggtgaagcccatgatctcgaagatcggctccagggtacccggcgtcggcgacgcgaattcgatgaactcaaagcccatcagacccattgggttttcgtatagatctgccatgatttggcgcctcatcattcttgtgttttgaaggtttcaattgccagcaaggatgaggagcacgggcggcgcacaggaaaggcctcgcacactgcgggcgaggaagtcaccaaagatgaggggggagccgagtagcttcatggtgtcatcggtctctgacggcttaggcttgcgtgagcgcaagtccatattcttgtatgcgtaaatcgattctacacagcgtaaccaggtttgtccgtactcttatcaaatccccattacccgtacccgtgcaaggggtttattgcacaggtagatgcccgccaggatcacggccccgcccagcagcatcggctgggtgaaaggctcgtccagcagcaaggcgccgcagatcaccgccgtcagcggattgagcgcgatgaatacaccactgcgggtcgcgccaatacgccggatgccatcgtaatagccgatatacgccagggccgagcccagtacaccgaggtaaagcaggctgtacaactgcggcaggtggatagcagtgagcgcatccagcgtcagccgtccgctcagcaacgtggtggccgcgagcatcagcgttcccagccacaccgaccaggtgacggtctgcaaggggcccaggctctggttcagcgtgcgtgagcccaatgaatagatgccccaccccgccacacagccggcgatcaacagatcgccgcgccaggcgtcggtcgcgccctgcagccccagtgggtcgcggttgacaatgacaaccgccgcgcccgccaggcacaacgcgattcccagcgccttgccaggccccaggcgctccttgaataacaggcaggatgccaggccaatcaccgctgggttcaaggcgacgatcagcgacgcccgcgacgcgccgatgtactgcaagccatagaaaaagcacaggttgtagaaaaagatgccgaagaatcccagcaatgccagtcgccccaactgcggcaggtttggacgggccaggggaatgcgcgcgaacgccatgaacagcaacagcgcgacgctggccagcacaaaacgcaggctggccgccagcagcgggtcgacggcaccggacaaagaacgcccggcgacgaaggtgccgccccagatcatggagacggcagcgagcttcaggtaggtcaaacaatcggttgaaggtttcatcggggtattgctctggcgttggacgggttagcctagtgtttgcccaatacctgatcatcgtaaaatgagtaaacactcatgaccctgacccaactggaaattttctccctggtcgctgagctgcaaggctttacccatgccgccaaccgcctgggtatcagccaatcggcggtgtcccatgccatcaagggtctggagcaggaactgggggtggagttgttccgtcggcatcaagcccatgtggcgttgaccgacatcggcgaacaattgctgttgcgcgcccgcgccatgctcggcctggccaacaccctggagcaggaggccgccgatgcccggggcttgaagcgcggcacgctgcgtatcggctccttcgggccaacgtcgtccaatcggctgttgccgcagatcctgcaaccgtttcgccaggcctaccctgacattgaggtgcatgtcgatgaaggcccggaccgccaggtcatccaatggctggatgagcggcgcatcgacgtgggcttcgtggtgctggagcaggagcggttcgacaccttcgcgttgttcaccgatcagatggttgcgctgttgccggccaaccatcccctggccgaacaccctgccctgcgccttgaagacctgtgcgagacgaccttcatcctgaccgaggccggctcgtcggagctggtctcacgcctgttcgccagcgcccggctgacgccgaaggtgcgttatcgttgcgcgcaactgctcagcacgctggaagcggtaagccgtggcgatggcctcagcgtggtggcccagggttccctgccggttacgccagatccgcgttatgtggcgcgcccactggcaccggccattacccgttcgatcggcctggcagtactggatcgccgccaggcgtcccctgcgaccctggcgttcatacgcgtggcgcagggcctggactatgggcatgtctcaccgctatagcgactggcgatgatggcgcagcgcgccgttgtcatccacggtactgaatcgcaggctggccgcaccggatggcgccttcaggaccgtgtcgaaggacaggtgagtggcggaccgtggggcaaccatgggtgggttgtgatgggggtattcgacgccttcgacaaccagtaccaccgacgccagcgtcacgtgaaacgcgctggggttgcgcactagcacaactgttcgctgcccgccgaccaggcgccaggccaatccgctcgcagcatccactgcgccgttggcaagcgccaccggtcgcaggaacagtttgatccgcgtccgaatcgcccattgcaaggtattgccgcccgtggcgtcggtggcagagggtcgaacactcagcacgttgagccagtacagggcttcctggtcggcaaccggcacaggagcttcgcttggctggtagacaatacgcaacgctgcacctttgcccgcgtcaatgcgtttgatcggcggcgtgagggtgaagggcacatcgctgtattccggtggcaactgcgcgtcacccttatcgatccaagcctggaccagcctcgggctgtcggcttgattggtcagttgcaggctcacttcacggctacccatggggtagatgatgcgtgtacggtccaacaccacgtcaccactggcgatggtagcccacaacgtgccgaaacacgccgccgtccagcagagcaagcccgtactcatcgataactcagggtgaacgtcgcctgcccattggccgttccggcctggatgcgtgcggccgtttgcacgtagcgtgccgtgagtggaatggtaaaggtgccattatcggtggtgcccgccagccactggttgggcgtgccgattgcgctggagtcggggccgtagctcagcagccggtcctggtgcagcaactgcagggccacgccccgagcattcgaatcgctggtaagagacaggcgattgctacggttggctggcgcggtctggtcggtcagggtcaccagcacatcgaggctggcaccggtaccgccggcacattgcaacacgatggtctcggtgacggcccctgcggtgctgccgatgccactgaaatcacgcgccgacaccgtccccaggcgcattgccaggctgggtgtcgagacggaacacgtcggtttgcgcggcggcccgatcaacgtgctgcccagggtgatcatgtgctcgcccgtcgccgagcgcacggcgaagcgggcgatcgggcgggagccgataatgccgccctggatcgtgccggtgacgaagaaaaacaaccgcccccgcaagccccagctcggtattccggggtatatgggcggatgcaaggcgctgataccggtactgaccgcctggggtgatctgttgtcacggtcttcggcaatcatacccatcccgacccccgcgacaccggtccggtaaatcggcatccgcaccccataatgaaagtaaaagctccctgtgaagttcaggtcactgctcagggatatgtagctccagtactcactgaacacatcgtcgtatcggcaaaccatcgcattgggaacgtcgaacgtataaccatccgggttacccagtacttgtccggggctcgggttaacgggcagcgggtcgatggcgggcacgttgatcagagtcggggcggcggcatcgcagtcgccacccgcccgggccacgggcagtgtcagtgccgttaacagcagcgccaggacacaggcggcaaggcgcttcatgggatggccacgcatcgaccttcccacacctgcgcgctgcgctggcgctcggcggaaggtctggacggcaattggtagacaatgacgcaacgtccatccgccgcagcgctccaacgcacagtcagccggccgctgtcgctgatacccctgacaaatgccttgctcgcctgccccactaccccgacttcgcgcccttgttcatcgaacacctgcgcggcaaacggcaagggcttgccgttgtcccggcgcgccttgacgatcacggcgcgaccgctggcgaccttgaagcgcaacagcgtcaatgcgcccagggtgggcacgacactttggctggactccagcagctcgacgtccacgggcatgccattgggatcaagcgtcaccacattgcgccggaatgcttgcaggttgggcgccaccgcataaccatccgcgccgatacgcgcgtggccgttgttgagtgctgccccctgcgcgtttggggcgtgtaccagggcggcggattcgcccaggctctgggacaggatcaatccgtcgggatgagcgaccagcgcgccatctgcgctgaatgccagttgcgcaccctggttggattggccataacccaggcgcatcgccactgcctcaccgcgatagccggtgtaagcattcactgcgctggcccgtgaacctgctgctgcgctacggttggcccaaacgccataatgagcgctggcatcctcccccagcagaccattgagacccagttgctgttggctaccgcgccggtcgccacggtcccaatgctgggtgctggtcaatgtgggggcgcgcagtcccgcacccaccggcatcgacaaggtcagggtgatgcggttatccagccgcccgcgctggccaacatcaccaaagaagagcgcgtcgctgtgttccctcgggctgcgccgctgctcgtcgcgcaggcgagtgtcttcgacacgtgaacgctgcatcgagacattccagcccaggcgtttccaggtagccccgtagctcactgaaaaggtggtctggcgcccctgctgccgccgccaataggcggtggaactgccggacagagttaacgttccgccgcccaattgctggctgacattcagatcgatgcggcttttctgcctggccaatcgctccgcgccatagccttttctcaggccttcctgtgcgctcaaggcatcgtacaaactgaaataccccggcgtggagtaacggtacatgcccagtgcgaagtgagtaccggaggtcggcacgcttttgtaataacccaggcccaggctgtgccccgagcggttgccctgcccgtccagccgtgtgcgggagccggtggcatccagggaccatacgcccaacgcagtgcttgccgcgacgcccaatttgccctggtgatagccctgggtgccggtgccgccaccgtacaccgtcaacccgtccgccacaccgtgggcaagcgtgccctgcaccatcgctggcatgcctgcggacacgccgagctggttcacctggcccaggctcacctgatagtggcgagccccgctgcgcaataacagcggtgttgcggagtacggcaccgtgaacgtgttccgccgcccatccacctcggtcacgctgacggtcaagtcaccgccatacccggtggctggcaggtcattgatctcgaacggacctggcgccaccgtcgtctcgtagagcgtgtagccattctggcgaatggtcacggtggcattgccttctgccacgccacgcaccaggggcgcataaccttgacgggacggggccagcatccgctcatcgctggccagggtcacgccccgtacgcgtacgccttccaggatctgcccgctgctgaaactgtcgccgactcgcaactgcgcctgccataccgggaggctgcgttgcgcaaaggtcgaggtgttttgatagggcggctggccggtcgccgaatcccaggtctgcgcgccttggtgccgcaggcgccagcggccgaggttgaggcccgcattcaggcccagataagcacggtcggtgcccgcgcccgccgtcatgcgggtagtgctgaaggtgtaattgagcaggccggcgttgatgccttcatcccagtaagacgggtcgataaagccacgggggagttgtctgacgtacacctggggcaggctcaccgtccactccagcgcggcggcgtctacacggcttgtcgccgcaggcagccaatccgccagcgcgggacactcggaagccgtgcgcagcgtgccgatgcgctccggtgcgacaccaagttgcagcagcaagtcatggtcgacacagggcacagcatcggcttgtgcgtcagtggtcatgaacgttacttcacggcggcccatgggctggccgttgacaatgatctccataagatgagtgccagggctcatcaggtcgtagcgactgaaccgagacacatcgacggccgcgccctcgctggaaaaggcttgcaggtcaaacaccggctccgcggctgtcgcatgttcaatcgacgtcaatgctgcactgatcagcccggcaagcatcgactgcctgttcacggtcaaagcctcagcgcagcacgctgcggcggtgagaacgcgccatagtcgttgatgtactggaaatgcacctgggcatcggccggaatgtgcggggcggcttcgtggaccgccaggcgcaaggtatcgcccggcgcaaccatcccggtgtcgctgcgcaagaggcgagcatcggcccgtggccccaaggccagcgcaacctcttggaacgtgacatgaaaggccgacgggttatgcacctccagcccctgtcccgtcgccgtcttgtagagcgaccaacgtaattgccccggagcgtcatcgggctttcccggcagctggtcaggacggaagaacactttggtgcggatgcggaacgcaaaccgcagttgattgccttgctcgtcgtccagcggagccgatgagtgaaaccttggcggtacctccagcacattgagccagaacagtgtttcgcggtctttgggcaatagctctcgggaatacaccaggcgcatggcgtggcccttgcccgcgtcgatacggaacaccggcggcgaaaggctgaacggcacgttgctgtcttccggaccgacccgccgatcaccgggttcgacccacgcttggaccaggcgcggtgctgcggcgtcttcgttggtcaattggatggtgatctcagcctggcgctcagggtagatatggcgcgttccgttgataatcacgccggcatcgaccgtcaccggtgcgccgggcaacagtgcggccagcagaaatcccaggcagcgccgggcctttgtcaaacaccccatggctgcgcactcctgttcccggctcgctcagggaaaggtcacggagtactgcaccgccgcctggactggcccattaccggccgcgccagtagcgatgtaccgcgccgcaaatggcaacgttgcaatgccatcgtccggaattgcgggggtggatgtcgtccccagccgcaggtcgatgggccggttcacggccccatcgatgatttgcacctccacattcgccgcgccggaggcggccgtgttgagcagattccccgtcagcgggttgaccccggggctggtgctctcgaacaacaccgccaccgaagacgccgcacaaggggatgccgtaccgcccacgtagatgaaaaagggcttgctgccggccgtatcaccggccgccttcaacgcggaggcctgcactttgtccagcgctaccggaaagctcgccccggtgcccggccctgatccggtccccccggtaatcggacacgtgctgccaacaatatcgccactgagggtgatgatgccgtctgctgccatgacaggcccgacgatgatacccatgaatgtgagaaacgccgctgcccgccttttgcttttcatgatgcgtccaccttagaaaaaccgacgttttgatcataagtaacgtgcgcaaggctgcctactgaccgaacggctaggtatcccgagcttattgcggcgactgcaactatcatcgagacaagtccgacctgccgtgctgacacctctctcatctcgcaacaggcttacatcccatgcccctgaccgtccaaggcccccgcagccgtgccacccgcaacctgatcagcgtgttctgcgccatggtgccgcttgcattgggcgtggtgatcctccattggcaagccgaacgtacccttgaacaaagcacggcccagaccgcacaggaagccgtacgccaattcgacttgatgctcgataacaccgcgctcgccgcccaggcattgctgccgttggcaggacagccgtgtgataacgccgcacagctggccttgcgtgaacaggtcacacgccgcccgttcgtgcgggcaaccaccttgtcctggcagagaaacatctattgcagctcgctgtttggcgaccaatacgcgtcaccggtcaacccggatgattacgtggacggcaagttatggctaatgaatggcaacccggtgacgccggataccgcactgctggtgtaccggctggtcgagcgcgacaaggccgcttttgcgtcgatcgacggctaccacctgaccaacgccctgcggctgatcagcccctacgccgacctggtgctgcaagtggggacccattggctgggggccgatggaaaagtgcatgacacagcggttccggtatttgccgtggcccaccatcatcttgcatccgcgcgttatcactacagcgtcgacgcgggcatgccggctggcgaagtctggcgctacatgcaggcacgatacccggcattgttcagcctgctggtgttttttggcgtggcggcgggagtgcttgcgcattggctgcaaaagcgttcttcggcccctacccatgaactgcgacgggccttgggcgccaacgaattcattccgtacttccagcccgtggtgcgcggcgatacccgtgaatgggcaggctgcgaagtactgatgcgctggcaacaccccaaggaagggctggtgcgacccgatctgtttatccccctcgccgagcattcgggcctgatcgtgccgatgactcgtgccctcctgcgccagaccgccgcgcaactggcgcctcatgccacgcgtttcagcccgggattccatattggtgtgaatatcaccgcacgccactgccaggacctggcactggtggaggactgccgcgagtttctcgccgcctttcccgtgggccaggtgaccctggtgctggagttgaccgagcgcgagctgatcgaacccaccgacattacccgccgcttgttcgacgcgttgcatcaattgggagtgatgattgccattgatgatttcggcaccggtcattccagcctcgggtatttacgcaacttcaatgtggactacttgaagatcgaccagagttttgtcgccatgatcggtgcagatgcactatcggggcatattctggacagcatcatagcgctgtcgggcaagctcgacttgggcatcgttgcagaaggtgtggaaacgcgcgaacagtgtgaatatctggccgctcaaggggtggacttcctgcaaggttacctgtttggaaaacctttaccctgtgatgaatttattaaatcgctggcgcgtcattgaatagccatgcactacctgcactgaaatagttgggtctagagaaaagacatgatttactcgtgacgcattaactactacaatttttcctgcctgtgcagaactcgcgggatgacttctttcctgggtcgccttaaagcgcttggcttatagctttgtctgcagttgatatcagccaactacactattggagtacagattttgtccagactcgccgaatttcgcgcagcagaaaaagcccttcaagagcagcttgcccagctggaatccctgaagaacgatgctggcctgaagaaagaaatcgaattcgaagaaaagcttcaagccctgatgaagagctatggcaaaggcctgcgcgacatcatttccatccttgatccaaacccgggcaagtccagcgcagttgctgccgcacctaaacagcgccgtgcgcgtgtggtcaaggtttaccagaacccgcacaccggtgaactgatcgaaaccaaaggcggtaaccaccgtggcctcaaggcctggaaagaacagtacggcgctgccactgtagattcctggcttcgcggctgatcgtactgcacttataaagagccccgctgacgcggggcttttttattttatgggttcgaaatcgaacttaaataacatttcactttgttcaaaaacgacaggcctcacgcacttaaagtttcaggctgtcgcgcaccgaactgacttcttccttgcttgcttcgtacgcctcggcctgacctgcgtatgaaaaaacatacgccttatcggtatcaaccgcgcccaccaatgtttgcgagagcacgtgccgcccgttctcggttatcacgcaagtagtttccaacgcttcaagacggctcaatgttgtagggtgcatcttgctgcacacgctttgataaccaccctgggcgaaatccttctggatggatttgcgcatctccagcagtacgccttgaagattaaccttatgaccaacttcaatcggcgtcccggtcaactccatgaccatcagggtcgtaccgttttcatcattcttgattgcccgctgccgcgacactgccaggggcttggcaggcgcctggtcatccgccatcgcttcttcaacctgccacccgctaggccaatgaatttcgggctcagcggctactacgcaggaactgcccaaccacaagcacagcatgctcaacaacggtttacgaaattcggtcattacgaaaaacacccaaggtccaaggaccaaagtttgagccccggcacccacaggccgcaaggcctgcgtggctttttcatctggcgaccgggccgagccttgcgtatcatggcccggctgcacggatgccagccgcaagccaaggaaccgctcacatttcagagccgcgtttgccccattttttctggagggcccatgagcctgcacgaactgaacaccttcccgggcgtcactgcccaacctgataccgccaccgccaacttcgtgttcaaccacaccatgctgcgggtcaaggacattaccaagtcgctggacttctacacccgcgtcctgggcttttccctggttgaaaaacgcgacttcccggaagccgagttcagcctgtacttcctcgccctggtcgataaatcccagatcccggccgatgctgccgagcgcacccagtggatgaagtcgattccaggcatcctggaactgacccacaaccacggcaccgaaaacgacgccgacttcgcctatcacaacggcaataccgatccgcgtggtttcggccatatctgcatctcggtgccggatatcgtcgccgcctgcgagcgcttcgaagccctgggctgcgatttccagaagcgcctgagcgatggccgcatgaagagcctggcgttcatcaaggacccggatgcgtactgggtcgaaattatccagcccgcgccgctgtaacgaaaaaaccccatgatcactcatggggtttttcatttgccgggcctggcttacgccggggcagaagtccggatcaggtggtcgaacgcactcagggaagccttggcaccctcgcccaccgcaatcacgatctgcttgtagggcacagtcgtgacgtcaccggcagcaaatacacccggcagtgacgtctcgccacgcgcatcgacgatgatctcgccacgcggtgtcaattccacggtgcctttgagccagtcggtgttgggcagcagaccgatctggacaaagataccttccaggtcgatggtcttgaactcaccactgtcgcggtccttgtacgccaggccggtgactttctggccatcgcctttgacttcgctggtcagcgcgctggtgatcacgtcgacgttcggcaggctgtagagcttgcgctgcaacacagcgtcggcgcgcaacttgctgtcgaactcgagcaaagttacgtggctgacgataccagccaggtcgatcgcggcttccacgccggagttgccaccgccgatcaccgccacacgcttacccttgaacaacggaccgtcacagtgcgggcagaagcacacgcccttggccttgtattcctgctcgcccggcacacccatttctctccagcgagcgccggtcgccaggatcacggtcttggacttgagggtcgcaccgctttcgaagcgaatttcgtgcaggtcaccggcgtttttcgccgggatcaaggcactggcgcgctgcaggttcatgatgtccacatcgtactgacgcacgtgagcttccagggcgctggccagtttcggcccctcggtttcctgtaccgagataaagttctcgatagacatggtgtccagcacttgcccgccgaaacgctcggcggcgacgccggtgcgaatacctttgcgtgccgcgtagatcgcagccgacgaaccggctgggccgccgccgacgacgagcacatcgaaggcgtctttggcgctgattttctcggcggctttttcgatgccgctggtgtcgagcttggcaagaatctcttccaggcccatgcggccctgaccgaagttcacaccattgaggtacacgctgggcaccgccataacctggcgctcgtcaacctcagcctgaaacagtgcaccgtcgatggcgacgtggcggatgttcgggttgagcacggccatcagattcaacgcctggaccacatccgggcagttctggcaggacagcgagaagtaagtctcgaagctgaactcgcctttgagggcgcggatctgttcaatcacttcgacactggccttcgacgggtggccaccgacttgcagcagggccagcaccagcgaagtgaattcatggcccatggggatgccggcgaaacgcaggctgatatcggcacccgggcggttgatggagaacgaaggcttgcgcgcatcgttgccatcggtcttcagggtaatcagcgtcgtaaggctgaccacgtcctgcaaaagggcaagcatttcctgggatttcgcgccgtcgtcgagggaggcgacgatctcgatcggctgggtgacccgttccaggtatgacttcaactgagctttaagattggcgtccaacatacgggcgatttcctgttcattcggtttattgcagacaaaaaaacgcccgagcgaacctcgcccgggcgttctgagggcggatgcagcttacttaagtgcggattcccgcccttgagacttcacagacttagatcttgccgaccaggtccagggacggagccagggtggcctcgccttctttccacttggctgggcacacttcgcctgggtgggcagcaacgtactgagcggccttgattttgcgcagcagctcggaagcatcacggccaacgccaccgtcgttcagttcaacgatcttgatctgaccttccgggttgatcacgaacgtaccgcggtctgccagaccagcttcttcgatcagtacgtcgaagttgcgggagatggtcagggttgggtcgccgatcatggtgtactggatcttgccaatggctggcgaagtgttgtgccaggcagcgtgggcaaagtgggtgtcggtggaaacgctgtagatttcgacgcccagtttctggaattcggcgtagttgtcagccagatcttccagctcggttgggcaaacgaaggtgaagtcggctgggtagaagaacacaacagaccacttgcctttcaggtcagcgtcggacacatctacgaagttgccgtttttgtaggcggtagctttgaacggttttacttggctgttgatgataggcatcgttgactctccgtcaggtttgtagaagggcttagtaagttgatgaggtgaatcctacccactctctacgccgatggctcattggcaaacctgatgctgacgattggttttccctatcaggtgactgtattaatagaagaaatctcaaagcagcggctggctcgccaggctcatgccgagaaagggcgtcgcttcaacatagcgcatggcggatttcatgtcgctccagccgacgtaactcatcaacgacttcaaatcccagccgctgcgatgagcccaggtggcaaagccccggcgcagcgagtggctggtgtagtgctcggcgggaatgccggcacgctccagcgcctggcgcagcagcgggatcacactgttggggtgcaagccctcctcccccaggttgccccagcgatcaatcccgcgaaacaccgggccacgtaccaaagccgaggcactgagccactcgctataggcctgcaccgggcacaggcgcaacagtgccggagtgtgataggtcttgccgagattgtcgcggtcgcttttgctgcggggtaggtacaggctgatccctgcaccgggcatcgcttgcacatgctcgatagagagacgacacaactcgtcgctgcgaaagccacgccagaatcccagcaggatcaatgcggtatcacgcttggcacgcagcaatcggggctggttctgtgtttgcgccgcttctatcgcttcagcgtcaagagaagcaaccacttgctccagatgcttgagctgcaacggttcggcttgcttctcccgcaccgggtgcactgcacgaatgcccttgagcaccttgcgcaccacggacgccttggttgggtcaggaaacccctggctcgtatgccattgcgccagtgccgagagtcgcgacttcagcgtgttgaccgccagcacaccggcatgggcgaccagatagcgcgccacgctgtcgctggtcgccggcaggaacccgccccagctcacttcgaaatgctcgatcgctgcgcgatagctacgccgcgtgttgtcgcgggtggcagcgttgagataacgatccagatcgctcatgggaggcctattcgtactgttgactgacgcattagcggattaaaccgtaatgacacgggataatacgccaatatcccatctgttaaatgatgaatttaaacaagttttatacgtgatatagtatgtatatacataccacgtaccacattacgaaatcgacggagaccccatggctcgcggcggcatcaacaaagcagtagttcaaacggcccgcttggcaatcctcgcccgcggcgagaaccccagcatcgacgcagtgcgtatcgagatgggcaataccggctcgaaaaccaccattcatcgttatttgaaagagctggatgaaagcgaaacccgcaccaccatcaccgaagcgccaatcgacgacgagcttggcgaactggtggcgcgactggcccagcgcctgaaagagaaagcccaggaaccaatcgacctggccctggcgcagttcgaacagcagaaggccgccctgctcgccgaggtgcgagcccttgaggaggcccatggccaactccagcagcagttcgatatccaggccgccgccctggcagaagaaagcgccgccctgcaaaccgccagcaccagcctgcagaccgagcaaacccgcaacgccgggctgagccaggcgtgcagtgactacgagctaaggatcaacgacaaggacgagcagattcgttcattggaagaaaagcacctgcatgcccgggacgcgctggagcattaccgcaatgccatcaaggagcagcgcgaacaggaacagcgccgccatgaaggccagttgcaacaggtacaggcagaactgcgccaggcccaacagagcgccatggtgcgccaggatgaaatcacccaactgcatcgcgacaatgagcggctgttgatcgagcatcgggtgacagcgaaggaattgaccgcactgcaggagcaatcccgcaaagatcaggcccagcagctcaaactgacggaacaggtgagcctgattgacagcgaacgcaccctgcttcaggagcgcctgcgggtagcggcgctggagagccagtcacgccaggaagcactggacgagcaccagcgcaccaataaaacgcttgagctggcgctgatcaaggctcaggccagtgtcgaggcgttgcgcctggctgccgccgttgcagcggcgccagaggcaacgcccaaggcctgatcaacccgctacgggcgtgcgcatggtgacgaactcttccgccgccgtcgggtgcacgccaatggtttcatcgaaatgctgcttggtcgcgcccgccttgagcgcgatcgccaggccctgcacgatttcccccgcatccgggccgaccatgtggcaacccagcactttgtcggtgtcggcgtcgaccaccagcttcatcagggtcttttcctggcactcggtcagggtcagcttcatcggccggaaacggctttcgaagacctgcaccttgtgacccttctctttcgcctcttcttcggagagccccacggtgccaatgttcggcagactgaacaccgccgtcgggatcatcttgtaatccaccgggcgatactgctcaggcttgaacaggcgacgcgccacggccatgccttcggccagggcaaccggcgtcaactgcacacgaccgatcacatcgccgatggccaggatcgaggactcggcggtctggtacaggtcatccacctcaacgaagccacgcttgtcgagtttgacgccggtattctccagccccaggttatccagcatcggacgccgccccgtggcgtagaacacgcaatcagcttccagcacccggccgtctttcagggtggccttgaggctgccatcggcctgtttgtcaatgcgctcgatgtcggcattgaattgcaggtccaggccgcgcttggtcagttcttccttcaagtgcgtgcgtaccgaaccgtcgaagccgcgcaggaacaagtcgccgcgatacagcaacgaggtctgggcacccaggccgtggaaaataccggcaaactcaacggcaatgtaaccgccgccgaccaccagaacacgcttgggcaattccttgaggaaaaacgcttcattggagccaatggcatgttcgcgccccggaatctccggaatctgcggccaaccacctgttgcaatcaggatgtgcctggcggtaaagcgctggccattgatttcgacctgatgcgggtccaccaggcgcgcatgcccttcatgcagggtcacgccgctgttgaccagcaggttgcgataaatgccattgaggcgattgatctcgcggtccttgttggcgatcaaagtggcccaatcaaaattcgcctcgcccaacgaccagccaaaaccgccggcctgctcaaaatcctcggcaaaatgtgcgccgtacaccaacagttttttcggcacgcagccgacgttgacacaggtgcctcccaggtagcggctttccgccacggccaccttggcaccaaagcctgcggcaaaacgtgccgcacgcacaccgccggaaccggcgccaattacatacaggtcaaaatcgtaggccatttcactctcctcggcaggacatcagcataccgacttagatggggctgaaaaacgaaaaagccacccgaaggtggcttttttggaacaggctgcctacagcgtgaatcagtaagccttgccagtcttgtagaagtgctcgtagcagaagttagtcgcctcgatgtaaccctcggcaccaccgcagtcgaaacgacggcctttgaacttgtaggcaatcacgcagccgtctttggcttgcttcaacagggcgtcggtgatctggatctcgccacccttgcctggctcggtttcctcgatcaacttgaagatgtccggagtcagaatgtaacgaccgatgatcgccaggttcgacggagcatcttccggcgccggcttctcgaccatgtcacgtacgcggatcaggccatcaccgatgtcgtcgccggcaatcacgccatacttgttggtttcctgagggtcgacctcctggaccgcaacgatggtgcaacgatacttctggtacagcttgaccatctgggtcagtacgccgtcgccttccaggttcacgcacaggtcatccgccaggaccacggcgaacggttcgtcaccgatcagcgggcggccggtcaggatcgcatggccgaggcctttcatctgggtctggcgggtgtaggagaacgagcactcgtccagcagtttgcggatgccgaccaggtatttttccttgtcggtgcccttgatctggttttccagctcgtagctgatgtcgaagtggtcttccagcgcgcgcttaccacggccggtcacgatggagatttcgttcaggccggcatccagtgcctcttcgacgccgtactgaatcagtggcttgttcaccaccggcagcatctctttgggcatggccttggtcgctggcaagaagcgagtgccgtaaccggctgctgggaacaagcatttcttgatcatatgggtccttacaaagggctgtgcgtacggaattcggcgcagtctaatcaggccgcagtcaccttacaatgggtcctgctggcgttgcgatgtcatcatagagaaaaaatgtcggcgtaagttccgcgcatcttacgaagcgcatctgcaccggcacggccaaaaaagcctgcacctcagtatttccaagggctacgacctttttagcatgcttttacggctgcaacactgacctagaataacttgcgcgtgcccgcgacatttggcgctatcattaggcccttgaaccagaccacgagatacttgatagatgtcagaaccaaaaggcgtgaacggctacctgatcaccaagcgagcggacggttggcacctgatcaacttccacggcgacagcgtcgccggcgcattcgccagcgaaagccaggctatcgctgtagccgaagtgtttgtcgatgaagcaggccacgcttcgagcaagcggcccaagggcaagtaaacgtcaacgccctgtgcaaaaggccccgctgaatggggcttttttgtgtttgtctgtacgtagatggcagttcgctataatctcgccagaacgccccacgacagtgtcagcgcgccctccaacaccctcgatgatgaacctacatgaacaagattctggcactgactgcagcactggcgctcgccggatgcaccaccacctctgatgtctacctgaaaaacggtgagcaaggcctgaccatcgactgctcgggcgaagccaactcctgggcgagttgctatgagaaggctgatgcctcttgcgcaggcactggctaccgtatcgtcggcaccgaaggcacaccttcgctcaaggaaagtgaaaagaccctgggccaggacgtcggcaacttcaaaagccgcagtgtcgtggtggtgtgcaagtaagcgtcgcggctacagctggatatcggcgaacttgatacccaggccacgaatggtctccaccaagtcatccagccgtgggaacgactcgacttcatcctgatcgtccaccaggaaaaagctgcggccgccgcttttcttgaagaatacgatccactcccccaagtcggccggattctgaatgatatgagtggccgatatctggccttcggcctggcgagccctgacgtgttcacgcttcataaaagacttcccgaaaaaacaaatgccgcacaaaccgagggtttgcgcggcatttttgcattgaatggctgagagtttaacggatgccctgcccaatcagcacgccttctacggtttggccgtagagattgatgccgtcattggcgtggaatttaacccgggtcttctccaccgaaccgtcaactagccgcgggtcctgcggtcgttcgtggctgttgacgtaggccgcaacgtcccacgcttgctggtcgctcaggctgccgcccttgcccaatggcatgttgtgcttgatgaaggacgccgccgtattgatgcggtgcatgccggccccccaattgtaagaatccttaccccacaacggtggcatcacgtagctgtcaccgaccttctggccctgaccttcgacgccatggcagaccgcgcattgccctttgtacacctcggcgccttgggcgatgtcgtaacccttggccggctgtgccacgtcgggataaccccggcccggcaattcaacgcctaacggcgccttgctggccagccagtaggcatacaccgaaagcgcagtaatttccgggctgtcagcagccggcggcgtaccgccattcatgctgaattggaaacacccctgcaatcgctcggcaaaggtattgaccttgtcgttcttctttcggtacgccgggtacatagggtaagccgcccataacggcgccgaattggccaggcgcccctggtccaggtggcaattgctgcaattgagcccgttgccgacaaatttcggcgctaggcgccgggtatccacgaacagcgcatagccatccttgaccagcttgccgtaggcgttgtcgggcagctcactttcctgaggtggctggaattgactgaccggtgcgtggccggcgacaggttgcaactgcgattggtcttccatagcaatcgtcgccgcctgggctgacgatatgcccaacaggcccaaggccaatatcagcgggctcatggcttggcctccaacttcaacgctgcgaaatactgggcgacaccctgcacttcttccgaggtcagggctttggcgatatgccccatcaagtcattcggatcattgtgacgggttccgttttgccaagccgtcaactgggccgccaagtaagcggcaggctgaccggccaacggtggaaacgcatcgccgacacccgtaccggccgggccgtgacaactggcacacgctggaatctggcgctcccacgccccctgctgcgcaagtttttgcgcagcgccgacaggcatctcgctgcgatgaaccatttgcgggaccgcgccaggcatcgccgccagcgcctgactgaccgcgtcgatttcagcgtcggtgagcgcagtcgccaagggttgcatcaccgggttggcgcgactgccgtgcttgaagtcttccagctgtttacgcaggtagagtgcaggcaagcccgccaaccggggaaaacccgctgcggccagccctgcgccatcggcaccgtggcaggcgacgcagggcatggcgccgggctgcgaaccgccttcggtgaagatcttcttcccatccaacgcgcaggcattgcccagtagcaacatcagcgcactgcccaccagtactcgttccagagacatcatcacgactccatttttatagttatatgcttaggcgtttatggcataagcctacaaatggtaggggaatgagcccctcgcgacaactcccaaaacgcgccatcaaaaaaagcccggtcccacaatggcggggccaggctttttgatcggattcgaagtggctgggtgaaacggcgcttatgagccggaaatgcactcttcgccggccttcttcacatcaccgggacggatcggcacattggacatgctctcgtagagcttgatactgctaccactggaacggtcttcgatctcgaaaatcgccgacgggtcagccgagaatttctgcggcacgatcacctgcacaccgtccttatggggctcgatctgcggcgggcggcgtgtggcggatagtttgcgcacgacacaggcagcatattcctgcggcttcttcccggaaatgaccgccagggtcggcggggtctgcttgatatctgcaaccgaagcacacccaccaatcgccaaggccagaaccaacacactccacttcatacaaaacctccgataaagatcctacgacagcggggatggtatttttctcccgcccacgtaggatttatccctgataactcggtaaataactgttttaaattgtcgacgtcgttgaagacgggccgataataaacgcgctggggctgataaactccatcttaacctacgtatcgttctgatttttcagaaaaagcccttctggagacaccccccatgaaattcatccaccagcgcgagcacctcaacgagggagacattgttgtcatcgaatgctcgcagacttgtaatatccgtctgatgagcgatgcgaattttcgcagctttaagaatggcggccgtcacacttaccacggtggcgcattcgacaagttccccgccaaaatcaccgcaccgagcactgggttctggaacatcaccctggacgtggtcacgcgccgagccatcagcgtgacccgcaaacctgcgctgtcccacaagatccgcattgtgcgccgtaccagctccaagctgagctgacccgaacaccccacaggacatgaccgtgaccgccactaccaaatacgtgatcaagtacaagctcaatggcgaacgccgctttgagttcgcacaactgcagaccaacagcgtcgaagaagccaagcaagcgctggcgaaaattcacgatgccagtgatgaaatcaccgatatcaatgtgagcaaggcgctgtaagccgatgtccggccccaccgaagatctgttcgccgacgacgccttgcagcaacccgccgggcgcgagcaaattggcgaacagtcctgtgtattgaaaggctacgccctgccctggattgagcgccttctaccggaactgcggcgggtgctggctcagtcaccgtttcggcaaatggtcacaccgggtggttttaccatgtcggcggcattgagcagttgcggcaagttgggctggactaccgacacctccggttaccgttactcacccgtggacccacgtagccagcaaccctggccgcagatgccggataccctgcgccaattggccgtgcaggcggctgcagaggccggtttccctgactttgccccggacgcctgcctgatcaaccgctatgtacccggcgcaaaaatgtcgctgcatcaagacaagaatgagcgtcgctacagcgaaccggtggtgtccgtctcgctcggcctgccggcgatttttctgtttggtgggcacgcgcgtaacgacaagacccgcaaagtctcgctgttccatggcgacgtggtggtctggggcggcgtggaccgcctgcgctttcatggtgtgatgccgatcaaggaaggcatgcacccggtaatgggtgcgcaacgcatcaacctgacctttcgcaccgccggctgatttgaccgcaagcttcagagtgccaggtgttcgcgacccggctaatctggccgggatccgtcaagagtgcccaccatgactaccgaacaagacccgcgctgggcagccatactggcccgcgaccccaaggccgatgcgctgttcgtctacggcgtgaagaccaccggcgtgtactgccgcgccagtagcgcgtcacgcttgccacgtccggaaaacatcgagttcttcgacaccccggcgaaggccgaagccgccggttatcgcgccagcaaacgcgcggccggcgaccagacccagctcgcagcgcagcatgcacaactggtggccgacgcttgtcggcatatcgaacaggccgacaccccgcccagcctgaacacgttggcgcagcacgccaacctcagcccttttcattttcaccgcgtgttcaaagccgttaccggcctgacacccaagggctatgccagcgcccatcgctcgcgcaaggtgcgcgacggtctcaagggcgcgcactcggtgacggatgccctgtatgacgcaggcttcaactccaacagtcgcttttatgagtccgctgaccaactgcttggcatgaagcccagcgactacaaggccggcggcaccaatacggcgatcctgttcgccgtcgggcagtgctcactgggagcgatcctggtggcgcagagcgctcgcggcgtctgcgcgattctgctggggaatgatccggaccaactggtgcgcgatctacaggatcaatttcccaacgccgaactggtgggcgccgacccgggtttcgagcaattgattgcgcaggtcgtagggtttgtcgaagcgcccgcacttggcctggacctgccgctggacctgcgcggcacggcattccaggagcgggtatggcaagccttgcgcgagattccagcgggcagcaccgccagctacgcacagatcgccgagcgtatcggcgcaccgaagtcgttccgtgcggtggcccaggcctgtggcgccaacagcctggcagtggccattccttgccaccgcgtggtgcgcagtaatggccagctgtcgggctaccgctggggcgtggaacgcaagcagcagctactcgcccgagaacaggcgtcgaagacctagcggatcccgatgtggatcaacgccaggtcgtccgcctggtaagcctcgaaatcagtgacaaaggcacggacctgcgcgccaggctgctggaagtaggtccagatctgttgccaggcgttgatgatcgcctccggcatggggcctcgggcttcgaacaccaggtagcgtccggcttctattacaaggctttcaaacccgtccgccggcccagcggtggcaacacccgctgttacgtcaaattcgccatgcgcgtccgactcatagccgctgtacaccccataaatgggtgactcaggcagttttcccgggatgccctcgtacagtccctcactgaaaaatcgctgccacatcgggccgatcttcgcacttgacggtgtcatctcatccgcgttgcgcgtgcgtattttcaagcccgagacgcggattgccgcgatgtgttgctcctgaatgttgtgcaaagccatctcctttaaagcttcagtttgcgtttacgaaattcagcgaccttatgccgattgccacataacgccatgctgcaccaacggcgcttgtgggccttggtgcgatcataaaaccacaagatgcattccggatgctcgcagcgccggatcagattgaaatccccttccaccaacagcgtggcggccgcctcggcaatcggcgccaggaactgttccgccgtctgctgcttgcgctggcgctcaagcgttggcgtctcgccagcacgccacaccagctgcggatggctcactgccttgcgtaaaaagctgttcagcgccgccggattgccgggttgttgcgccttgcgtgcagccaccaattcacgaatcacctcgcgcagctctcgcgcggcgctgagcaaggcgcccggttcaaacaacgggatgccgttctgttcaacccactgcaggcgcaccagccaggcggctacgtcggcatcggtctgccagaaatcccacggcacgccgtcgatattcgcaagagtgttgagcatgtccagcaccggatcgtcggccaggacgtaaggttccgagggggcggcagtgggtggggaaagggtcatggggcaatcctctagtgagcggccacatcgtaaccgctgtttcgacaccaggatagttacaaaaagcacaacgctaacctgaataaatagtttgacaggttacaatattcggcgcagctttttaaaacggtaacccgtaaatcacctcaatcaagttacaaaaggctctccatcatgaccactccaacccctgtcgttcactaccgccacgtcgatgccgatggtgtgcgcatgttctaccgcgaagccggcgctgcaacggcaccggtcatcttgctgctgcacggctttcccagttcgtcgcacatgtaccgcgacctgatccccctgctcgccacgcgcttccgggtcattgcgccggacctgccaggctttggtttcaccgaggtgccggccgagcgcgattacgcctacagcttcgacaacctggcaatcacggtcgggcattttgtcgatgcactgcagttgacccgctacgccctgtatgtcttcgactatggtgcgccggtggggctgcgcctggccgtggcgcatccggaacgggtcagcgcgctggtgtcgcagaacggtaacgcctacctggaaggtctgggtgatgcctgggcgcccattcgcacctattgggccgagccgagccaggccaaccgcgaggtgatccgcaacgcagtgatcagcctggaaggcacgcgctaccagtacctgcacggcgtaaagcagccagagcgagtagccccggaatcctacatgctcgatgtactgctcatgcagcgccccggcaatgacgagatccaactggacctgttcctcgactatcgcaacaaccttgcgctttacccggcgttccaggcgttcttcaaggccacgcacgtaccgacgctggtgatctggggccagaacgacccgttctttatcccgccaggcgcccatgcctatacaaccgacaacccgaacgcggtggtagaactgctcgacaccggccacttcgccctggaaacccatgcaacccatatcgccgaacgcattcacgccgtgctgggcgacgccatcgattgatgatgcaccacgaaacgacgcgttcgtccagtgaataaaacagagtggccggggggcatgggccctgctaaaacagcgaaaagcctcactaacgctggagacgcatcccatgagcacctggccagacacccgccttctcgacctgctgggcattgaattgcccatcatccaggctcccatggcggtgggcacgaccaccgccatggtcatcgccgccaaccaggcgggtgcgctgggctcattgccggcagctgcactgagtatcgagcaattgcgcgatgcactgaccgccatccgccaggccagcccgcgtccgatcaacgtcaatttcttctgccaccaaccgcccgcgccagaccctgagcgtgatcgtcgttggaaggcactgctggagccctactaccgcgaactgggcgccgactttgatgcgccaaccccggtttccaatcgcgaaccgttcaatgacgcggcgtgccaggtcgtcgaagaattgcgccccgaggtggtcagctttcactttggcctgccggaaaagtccctgctggaccgggttaaagccaccggtgccaaagtgctgtcctcggcgaccactgttgaggaagccatctggctggaacagcacggttgcgatgcgatcatcgccatgggcagtgaagccggcggacaccgtggtttgttcctcagtgatgacctcaatacccagatcggcctgttcgcgctgttgccgcaagtcgtcgacgccgtcagcgtgccggtgattgccgccggcggcatcggtgatgcgcgggggattgtcgcggcctttgcgcttggcgcctcggcggtgcagattggcacggcgtatctgtttactcccgaagccaacgtcacggcttcacatcactatgcattgcgccatgcccaggccagcgaaaccgcgctgaccaatctgttcaccggtcgcccggcacggggcatcgtcaaccgggtgatgcgcgagttgggcgcgatcaacccggccgcaccggcgttccccacctccggcggtgcgctgataccgctcaaggccaaggatgaagcgggcttcagcaacctatggtccggccaggcactgcgcctgggcaaagacaccacgacctatgaactgacccgcgaattggcggagcaaacgctacagcgccttgcccgcttcggccgctaggccagcaccgcgtcaaccggctcgaacccactgagccggctttcgtgggccgggctcagcaccgcaaaacggttctggcgcagtgcgctgatgccatacaccacccgcgcaaagtgctcgttgtcatgggcatagggctggctgcgcaggatcagggcaaaaaagcactcgggctgacgagcaaggtccgcgccgcgaatggacgccagccctgtggcgaacaacgcgcggccactggcggctgacaagcgcccgtaactcaccgaacgggaatgatgaaaggcaagctcggcgtccgtcttggcctgctcgtacaacaggtccattgcttctatcgcgaaaagactgacggaggccttgtcgccagtgacataccgctgcacaagttggcgcacgccttcgcgccacgtgtcatcttcctgctcggcgcgcatggcgatccaatcaatgcagtccactaacgcgtcaccgcctgcggtgaggttcgccggcaatcctgattgcagcttttccaggtgcatcagcgcgtgttgcaccatggcagcttctgcgctcatgacctcgctcatcaggtcgagaatctccggcttcggctccccttgccaggtttgcaggaggcccaacagttgcgccctgaggtcgcgaacggcttcgacgccaagggtacggcgcaacaactcctccgactcgttcaccaggctggtaaggttactgacctggctcaacaggtcagcctggctgaacgaatggagcgtttcacgcccgggggcggaggcatcgaacgggctggggccgaactggtggaacacctcgttccacaaccgctggatctgccggtggatctgttccgtataacgcgacggcaagttgatcacgctgcaactgccttcgttgaaaaaccctgcccaactgatgcccagtgcgaagacgccatcgacctcatgactggcgtgtgccatcgactcatagaacttgtagcagaccactttattctgcaatccaggcagcgccttgaggtactgctcccaactacccagcgtgccgaaatagatgcgcttgtcggcgtccggatcaaggtggctgagggcgctgtccatgatggcggtatcaccctcgtgacgcaggcagagtgcaaagtgctgttgcggttggctgtcgtgcaggtcggaaaacaccagcacaccaatgccctggacctcccaaccattcttcagcaggtgttcggcgcaacggctggcctcggtataaccacaggtggtggaaacctcacggtagcccgtcagctcggccaactcattgtcactgcgcaaagtcttgcgcaaacgctcacgcatcgctgccagccaggtgggcgtaagcaggaacacaccctggctgtcgtcattgagcgctacgcttaccggtgtctcggcgggcagcggtacgttgagcacgggcacggcaaacttggcggccagggttgactgcttgagcaggacacgcagcttgcggctggcgatagtcacgtccacccccagatcgaccaagccgagcagtacccccaatttgcactcatggatgtaggccgcgtactcctccgggcgatcactgttctgcgccagtgcatagtcaaagctcacgtcgctgatgttggcgacgaaccggatcatccctgacagtaacagcgcgcccaatccaccggtggggccaatggacgcgatgaccaatgccgacaccacccgcacaaggcttttgaacatgcctgttttcgcgcggcgccgctcttcgtcggaagaaaatacggcgtagtccatctgctgtttgatttccgcgatggccgcctggcgtaactcgagcgcaaggtcttcggtggttcgaaacgtaatcggttgcggtggaaaacgccggtagtgatagccgtagcgttttttccgggggtggaaatccttgcgcgtcaggctgaatttatccaccggcggcaagtgcgcaccgatgaaggtcatcagcttctcactgggctgacctggcgccgtgctgggctgccactcaacccacttggggcctgcgatgttaagcgataccagcaacgctttgttggacgaaaacgccacgaccaaggcgttcggtaccaccttctccttgaacagcaacgcctgtggcttgaggtcgcccttcaggtatcgaaaggcgactgcgcgcaattcaacatcctgctcttgggtatccgccataaactggccaactcgcacccgggcaacggcgtcgcaggtgtcatcgaacaacttcttgaagtccgcgctattggaaaggctgtcgacatcggccaggaattccgcgaccagggtatccctcaaaccggacaccgctttgatttctgagggtgacagcggctcgccgtccaagtgtatttcgccgactttttcccggtaaaacgcactgcgctgtggctcgccgatcatcacctgggcgaaggaaaaatatttgtagcgcggtggactgtaggccgacatgcccgacgaatgcatggggtaacccaccaggtacttgtagcgaaaacgtttaccggtctctatccgctcggtagttccgttcggcaggccggtcttggccaggcaccgtttgactagcgattgaatgtaggtcttggtgagctgggcgttgcccacgcttcgggccaagccatcccacttctgccaggctctgggagctctcggcagttgatcgacgggcggaaggcgttgtggccattgtgtagtgtcccgggcgacgatctgtacagtaatcaatgcctgcgccgcatcatttcgcacataccagcggttttcctgatcgctgctgaccgagatcaattggtcgtcggccagcacgccacagttgacccattggcagcgatgattcatgtagacgctcaagtaatagccccatttggctcgcgaccaataggcctgcgggatattgacggtgtaggtctgttccgcaggtgttcctggcagtcgccgtagggtcacgaccacgcattgatcgacgccgatatcgatgtcgggcagcaccactgaaccggagacccagcggggcagaatcataaagtcgacatcggcgacgggctcgtcgaagggtacgagccaaacctggttctttgtcgggtccctggaatagtcgatgtagtcccccgaccgcgcgccaatccgcaaaccgggccacgcggtactgattgccttgggccaatcctttaacgacaacgcgatcaacggcacatcgaaccagatcttcgccagcaaccggttggtggtactccagacactgcacagcactacttcggtcttcaccaggttcctctcgggcaacaccagggtataggacgtgccggtggtaaccctggattgactggcggtacggatgctgtcgagaaagaatcgggtgaacgtcagttgctcggcgacggccccgtaatagcgtggcatccggggttcaacccgtaccgagcttttttgccatttgccaacgaaattcttccagtcataacgatcattaagcaagtgccacaacggcacttcctcccaggcctcaataatcggcgcttggtcggtgtcgtcagggtcggcgtagaccgagaacttcaccggcaccctggaagtggtcttgatcagcgccttggcctctggcgccagcctggaccgttgcaggacacggtcatcgatccagtgctgtatctggctctcggacgaggcaaggctggtcgccccgacgctcacataggcgtagcttttctccatgggttgttccttcccgaaagcgcctcactatccttgcatcggctgcccatggatgtaggccgcccatcgagtgatgcagagaaatctcggcgcatcgacgacggctttttttctgcttgccatttattcgctatatacctatacatacagcgttttgcagccctccagcacttctccaactacacaggcatcggagccgcatatgactttcagcaccaccccgcgtttagtatcgacctgcctggcgacgtggatcgccctgatggccaccgccgcccacgccgatgaagtccaggtggccgtggccgccaacttcaccgcgccgatccaggcgattgccgccgacttcgaaaaagacaccgggcataagctggtcgcggcctacggtgctaccggccagttctacacccagatcaagaacggcgcgccattcgaagtgttcctgagcgccgacgacaccaccccgcagaagcttgaaagcgaaggcgacaccgtcaagggttcgcgcttcacctacgccgtcggcaccctggcactgtggtcggcgaaggacggttacgtcgacgccaaaggcgacgtgctgaagaaaaacgacttcaagcacctgtcgattgccaacccgaaagccgcaccctatggcctggccgccacccaggtattggccagggaaggtctgaccgacaaggtcaaggacaagctcgtcgaaggccagaacatcacccaggcctatcagttcgtgtccaccggcaacgccgagctgggctttgtggccttgtcgcagatctacaaagacggcaaagtcaccagcggttcggcgtggatcgttccggcgtccatgcacgacccgatcaaacaggacgcggtgatcctcaacaagggcaaagacagcgccgctgccaaggcactggtcgaatacctcaaggggcctaaagccgctgccgtcatcaagtcctatggttacgagctggccaagtaaatgccgttatcgagtgccgatttttccgctatctggttgaccatcaaactggcctcactgaccaccgtgatcctgctggtcatcggcactccgattgccttgtggctgtcgcgcacccgttcctggtggcgcggccccatcggcgcggtcgtcgccttgccgttggtgttgccacccacggtgatcggtttttacctgttgttgaccatgggccccaatggctacttcggccagttcacccaatggttgggcctgggcaccctcaccttcagcttcgccgggctggtgattggctcggtgatctattccatgccgtttgtggtgcaaccgttgcaaaacgccttctccgccatcggcacacgcccgctggaagtggccgcgaccttgcgcgccaatccttgggacaccttcttcacggtgattttgcccctggcccggcccggctttatcaccgcctcgatcctgggctttgcgcacaccgtcggcgaattcggcgtggtgctgatgatcggcggcaatatcccggacaagacccgcgtggtctccgtgcagatctacgaccatgtggaagccatggaatatgcccaggcccattggttggccgggtccatggtggtgttcgcgttcctggtgttgctggcgctctactccagccgtaaaaccaggatgggctggagctgatgtcgatgatcaatgtacgccttaacctcaagtacgcaggttttgccctcgacgtggacctgcacctgcccggccgtggcgtgaccgcgctgtatgggcattccggttccggcaagaccacctgcctgcgttgcatcgccgggctggagcgcgccgaagacggcttcatccagatcaatgatgaagtctggcaagacagtcgtaacgggctgttcgtgccgccgcataagcgtgcgctgggctacgtgtttcaggaggccagcctgttcccgcacctgtcagtgcgcgccaacctggagttcggcctcaagcgcatcccgcgccaacagcgccgggtggatatggcccaggccactgagttgctgggcatcggccatctgcttgagcgccacccccagcacctctccggcggcgagcgccagcgcattggtatcgcccgcgccttgctcaccagcccgagcctgctgctgatggacgagccgctggctgccctcgacagccagcgcaagggtgaaatcctgccgtacctcgaacgcctgcacgatgaactggatatcccggtgctgtacgtcagccatgcgcaggatgaagtggcacgcctggccgatcacatcgtactgctcagcgacggcaaggccctggccagcggccccatcggtgaaacgttggcgcggctcgacctgcccctggcgcggggtgacgatgcaggtgtggtcatcaacggcacggtcaacgcctacgacgaccactaccaattgctcacgctgcaactgcccgccagcgccctgcacatgcgcgtggcccacgcaccgctggcgttgggcaaggcgctgcgcatcaaggtgcaggcgcgggacgtgagcctcagcctgcaagccgaggagcacagcagtatcctcaaccgcctgccagtcaccgtcacccaggaaattgccgcggacaacagcgcccacgtgctggtgcgcttggacgcaggaggcacgccgttgctggcgcgcatcacgcgattctcccgcgaccagttgcaactgcaccccggccaggcgctgtgggcgcagatcaaggcggtcgccgtgctggcttgagcaatcttttggcacgaccgcatacggctgcggtcaatcagacataccggcctgatgtgttgccaaggaacccgccccatgtccgattctgcgctgccccgcgacctgcattacgttgacgacacccagcccggcatccgtcgcaagacgctgcggggcaagttccagtacttcgaccccaagggcgagcgcatccgcgatgccgacgagatcaagcgcctgaatgccctcgccgtaccgccggcctacaccgatgtgtggatctgcgccgacccgcaaggtcatctgcaagccactggccgcgatgcacgtgggcgcaagcagtaccgctatcacccgcgctggcgtgaggtgcgcgacagcgacaaatactcgcgcctgcaggaattcggcaacgccttgccgaagctgcgtaagcagttggaagcgcaaatcgccgaacccggcttcacccgcgaaaaagtcctggccacggtcgtcatgctgctggacgccacgctgattcgggtcggcaatacccagtatgcgcgggacaacaaatcctacgggctgaccaccctgcgcacccgccatgtggacgtcaaaggcagcgagatccagttccagtttcgcggcaagagcggcgtcgagcatcagatcagcgtcaaggatcggcgcctggccacggtggtcaagcgctgtatggagctgccgggacagaacctgttccagtacctggacgaagacggtgagcggcacaccgtcagttcccaggacgtcaatgactacctgcatcgcctgaccggtgcggacttcaccgccaaggactaccgcacctgggccggcaccgccatggcgctggcggtgttgcgcgagctggaatggcagcctgagtcggatgccaagcggcatgtggtggcgatggtcaaggatgtcgccaggcaactgggcaacaccccggcggtgtgccgcaagtgttacatccaccccgccgtgctggagcatttcagcctcggtgaactctccaaattgcccaagccgaggctgcgcaaagggctcaaggccgaagaagtggcgttggcgatgttccttgagcaactggcggcggacttgccgaaaaaagccaaggcgggttaggctctgcctcccttctgatacgcaggacgaccgccgacgtgaaccactaagccttccaaaatgtatctgcaacgagccgcctggcgcgcttgttggcctgtccgacatttttttggaggtgctgatgactgacgtcaaccggctgcccgtgcttgtttccctgcaacacttatccttccagttcgccaatggcgacacgctgctggatgacctgaacctgtccatcgattacacccccaccggcatcgtggggcgcaatggtcgaggtaaaagcgtactcgccaaattgatcgcggggctgctgtcgccctcctccggctcgttgaactgcccgaacagcgtgatctatgtcgcgcagaacgtcgtggtagcaccaggcgataccgtcgccgatcttaccggcacggctgcgatattgaccgcccttgagcgtatggccgcaggcgccgcacagatcgatgaccttgaattgattgatgatcgctgggacttggccgagcgcttgcgtagtcgcttggataccgcagggttgtcgcggctttctgttgatacccccacccgtcaactcagcggaggccagttggccagggtcgccgtcatcggcgcgctgctagccgcgccacagttgctggtgctcgatgagcccaccaaccacctcgacagcgatggccgcgcctggctgctgcgtgtcctcgacgaatggcgtggcggcctggtggtggtcagccatgatcggcaattactcaacgccatggggcgcatcattgaactgtcgccgctcggcgtaaacgtatatggcggcaactacgacgcctatcgacaacagcgcgaggctgaacaacacgccgccgtcgccgcgctggaacacgcccgcctggaacgcagccgcgaaaaacggcgcctgcaaaaagaccacgacaacctgcaacgccatgccgcccgctcacgcaaacatgcggaaacggccaacgtcgatcgcttcaccaaagcgcgctggaaaggcgccgccacgcaaatcctcaacaccgtacgcagcgcgcatgagcaacacaaacaggagctggatacccaggtgggccaagcctatgcacgggtcgaggatgaaacaccgacgctgttggcattgcctgcttcagcggtgcccaacgggcgacaggtgctgtcgttgatcgacgcgcaattaccctggctgccgtcgacctgcctcaacgtccacctcgtcggcccggtgcgggtggctgtgcatgggcccaacggttgcggcaaatccacgctgctcaaagtgttggcgggagaatggcgtgcagaacgcggcgaatgccacgtgcacgtacccagcgcctacatcgatcagcacatcgcgctgctcgacgaccatcgctccatcgtcgaacaactgaacctgctggacaccccgctggcggagggtgaattgcgcacgcgcctggccctgctgcaactggatgccctgcgtgtgacccaacccgccgggcaactcagcggcggcgaacgcttgaaggctgcgatggcggttgccttgtggcgcgcagtgccggcgcaattgctgttgctggacgagccgaccaaccatttggacctggaatcggtgatggcgtttgagcaagccatgcaaggttttgccggggcaatgctggtggtgtcccatgacgcggcgcttgtgcaggcgatcaggccgacgcactttctgaattggcatcctgcgggttggaccctgacgcctgcctgaggtcattgcatgcgcgcttaaagcgtcctacggtagtggccggataatctcaccgaggaacccggccctatgttgccttcgccacgaaagccctacgtcaatgccgcactggcccatcgacaacgttggcgtggccgcgtcggactgatgctggtggccagcctgtcggtgctggcgggcatgaccgatgccatcggcttcatggcgagcggtgactttgtttcgttcatgagcgggaacactacgcgcctggcggtggcgataagcgcgggtgacctgggcctgaccgggcggctgctgttgctggtggcgacctttgtggtgggtaacgcgctgggcgtggtggtcagccgactcagccgtcgccatgccctgcccttactgctgtgtattgccgccttgctgtgcggcggtgcactgctgcccttcgccgataccttgcccgcgctgctggcggcgatcatcgcaatgggcatgctcaatgctgcggtggaagaggtcaacgggctgccggtgggtctgacttacgtcaccggcgcactgtcacgctttggccgtgggctggggcgctggctgctcggcgagcgccgcaatggctggcgcgtgcagttgatcccttgggccgggatgttcgtgggggcagtaatcggtgcgctgctggagcagcaactggggctcaaggcgctgatcgtcagcggtggattggcggggttgctggggctggtatcgctgaagatccctcggcgctggcacctgggtttcatgccgcgctgagggctaaaaaggagctcgcccgacgtttaggcctcgacgtccgtgtactggtaaagagccatcatgtcgggcgagcgggtgaatcataagcgaatgccttgcggctgtcgtgccaggcatttcctaaatcgactaaggcaacggattacaggcaggtcgccagtgcggccaaacgacgcttggccggcatattgtcttcgatggcgtagtacttgatggtggaaccgctgcccgcgctctgcacatcgacaaagtaatcgccggcggtggtgtacaccgtgaagccacccgcgccgattggctccttgaagccgccggcgtcaacgccgaacacactttcgtcctgccagccgaactgtacgcactcggcaacgaccagggtggccttgtccgaagccagggtcttgtaaggcgtgcctgcgcgcgcctctttcatcttcgaacccgcgcaaccggccagggccgccagtaccagtgcgccaattaccaccttgtgcatgccattgctccgttggaaaaaaacgcgactgtaccattgccactggccggactgatggccgcatgaactttgtttcactgtaaaggggcaaggcgcgacctatagtggtcacgctcatttttagaagtctcccttcggcccgctctcccgcgggctttttttcgtcccggttgtgctcagagcagccagcggaacagatagaacaacgccatgctcagcagcaccgtcatcagcacattgcgcgtccagaacatcaacgccacggcgctgatacccgccagcaggtaagggttggccgggctcaggttgagctggtggtcggccaggaaaatgatcggcccgcaaatcgccgtgagcatgcccggcaccgcgaatcccaaaaactcgcgcgcgccacggttaaggcgcaccggcaggcgtggctcgataaacaggtaacggttgagaaacaccaccaggcccatggccacaatcatgatgtagatcattgctgccccactcccagtcgcttgcaggcataccctgcgctcatgcccagcaggccggacaccaccaccgccgactcccaatgcaggaaactcagccacaccgagaacaacaacgacaccgccacacagaccaccgtaggaatgtcacgcaccaccggcgtaatcaacgcaatgaaggtggcggcgatggagaattccaggcccagctggtcgagaccgggaatgctcttgccgagcacgatgccggccagggtgaacaggttccaggcgatgtagaacgtcaggccgacacccagggcataccagcggttgaaagtctcgcggtcatagtgactgaccagcgcaaagaattcgtcggtcagcagaaagcccaggctcatgcgccagcgagttttaaggggagaaaggaccggccgcaaatgcatgccatacagcaaatgctgggaggtcagcagcaaggtggtcagcacgatggaaatcaggctggcgccgctcttgaccatgccgatggcaaccagttgtgcagcaccggcgaatacgatggcagacaggccttgggcttccaacggagtgaattgcgcatcaatggccatggaaccggccaacagtccccagggcgcgcaggccagggacaaaggaatcacggcgatggcgccgcgagcgaaggcgtaatgaggtaaggcagtaggcatggaaacggctcatcgacagacagtcgacaagcatgccagcgcaacagtggcgttgtcttgaacgatcttgctcaggcgagccgcaccgacacctgctccaccgaatcacgcgcttcgcgcagttcgtgggcatcctggttaagtcggtgaatggtattgagcaggcgctggcgcagcacttcatcgccgagtttctcgacggcgcgcatcaggtcgaacgccgcggtttcgttattttccgcgacggaatccagggtcttgcgcaggttgcgagtggcacgggtcacgcgggttcttccttcatcagcaatgggcaggcactttaggacattcgtgtttcattttaatttcaaacacttgtggtgattttcgagacatatgatccaagtcaattgaaacgggatttgacctacacatatggaaatacgtatattcggataaccatatatacgaaggccttgaccatgtcggacctcatctcgccccccaccctattcaaatgtctggccgatgccacccgggcacgcctgacgttattgatcctgcgcgaaggcgaactttgcgtgtgcgaactgatccatgccttggacgacagccagccaaaaatctcccggcacctggcgcaactgcgcagttgcgggttgctgcaggaccgtcgtcagggtcaatggatctactaccgcatcaatcctgcgctgcccgagtgggtgacgcaggtgctgcacaccaccctgcaagccaaccagccctggttgcacaacgacgcactgcgtctggatgcaatgggcgaccgaccacaacgggccagcagctgctgctgagccatcggagcgtttatccatgcttgtcgccattgcgatttttatcttcaccattgtcctggtcatctggcagcccaagggcctgggcgtcggctggagcgcaaccttgggcgcgatcctggccctggccttcggcgtgatcagcctggctgacattccggtggtgtggcacatcatctggaatgccaccggcacttttgtcgcgctgatcatcatcagcctgctgctggatgaggctgggtttttcgcctggaccgccttgcatgtggcgcgctggggacgcgggcgcggacggcgtttgtttgcctacatggtgctgctcggcgcgctggtgtcggcgctgtttgccaatgacggcgcggcgctgatcttgacacccattgtgatgtcgatgctgctggccctgcgcttctccccggcggcgaccctggcctttgtcatgggcgccggatttatcgccgataccgcgagcctgccgctggtagtgtcgaacctggtgaacatcgtctcggccgactacttcaagatcggtttcaacgaatacgccgccgtgatggcgccggtgaacttcgtcagcgtcgcggccaccctggcggtgctgctgtggttcttccgccgcgatattccacaaacctacgacccggccgacctggaagaccctgccagcgccatccacgaccgcgccaccttccgcgccggctggtgggtgctgggtatcctgttggtggggtgctttgccctggagccgctgggcattccgatcagtgctatttccgccgcctgcgccctgctgttgctggtgatcgccgccaaggggcacaagatttccacgcgcaaagtgctgaaggaagcaccgtggcagatcgtgatcttttccctgggcatgtacctggtggtctacggcctgcgcaacgccggcctcaccacttacctggcgacctggctcgatacgttcgccacctacggcgtgtggggcgcggccatgggcaccggtgtgctgacggcgttgctgtcgtcggcgatgaacaacttgccgaccgtgttgatcggtgcgctgtccatcgagtccagccatgccgtgggcgtggtcaaggacgcgatgatctacgccaacgtgatcggcagcgacctcggcccgaagatcacccctatcggcagcctggccaccttgctgtggctgcacatcctggcgcgcaagggcatcagcatcacctggggctactacttcaaggtcggcatcgtgctgaccctgccggtgttgttgatcaccctcgccgccctcgccctgcgcctgagtttctaacggagataccccgatgaaagtcctgttcatgtgtaccgccaacagctgccgcagcatcctgtccgaagccatattcaaccacctggcgccggaaggcttcgaagcgatcagctcgggcagctttcccaagggccaggtgctgccgcgcagtttgagcacgttgcaggcggcgggcatcagtaccgaggggttgtacagcaagggcaacgacgcctttgaaggcagcccgccggatgtggtgattaccgtgtgcgacaaggccgccggtgaagcctgcccggtgtatttcgggccggcggtgaaggcgcactgggggttggaagacccgtcggacgtccagggtgacgacgccagtgtgcaagcggcattcgacgccacgctgaagaccatcgccacacgttgccgggcgtttttcgtcctgcccttcgacgaactcagccctgccgacctcaaggcggaacttgcgcgtattgcgcagttgtaatcggaggccctatgaccaccctgcccaacctggacctgtccctggtcgactcaaaactcggcggcgcggaccagccgccgcgcatcctgctgctctacggctcgacccgcgaacgctcgttcagccgcctgctggtggaagaagccgcacgcctgttgcagcacttcggcgcacacacccgcatcttcaatcccagtggcctgccgttgcccgatgacgcgcccagcgatcaccccaaggtgcaggaactgctggaactgatgcagtggtccgaaggccaggtgtggtgctcgcccgagcggcatggctcgatgtcggcggtgttcaaggcgcaactggactgggtgcccttgaccctgggcgcggtgcgcccgactcaaggcaagaccctggcggtgatgcaagtgtccggcggctcccagtccttcaacaccgtcaaccaactgcgggtgctggggcgctggatgcgcatgttcaccatccccaaccagtcctcggtgcccaaggccttcatggagttcgatgaacaggaccgcatgaagccctcggcgctttatgatcgggtcgtcgatgtaatggaggaactggtgcgcttcaccctgctgctgcgcgaccgccccgacctggtggaccgttactcggagcgcaaggaaagcgccgatgaactggcgcgccgggtcaatcaacggtcgatttgatccccccggccagcgtatgctcgtgcctgtcccccgactgagtgaaatcgatgagcgccgtgcaacacgcctggctgggcaactatgaagtcagtagcacggcctgcaacgggctgacctttgcccgccatagccatgatgaatgtgtgatcggcgtgaacctggtaggcgaggaaaaagtctggctggatcgtcgcgagttccacgccggccccggtgccatcaccttgtacaatcccggccagattcaaggcggcggtgcggccgatggtgcgccctggcactttgtgagcttgtacgccacggcggaacaattggcggcggacctggggctggtgcacctggaatttgaccgtgctttatgtgttcagcccgagcttgccctgcgactggccgccgcgatcaagggagcgctaagcggtgacgcgctggttcgcgacgtgaatgaagacgccttggtgctgctgttgggtgaagtggtgaacatcagcggggtacgcctgcccggcagcgccaatcccggcaaacccctggtcagccgcgcccaggaattgctcgccgaacacctgcatcaacccctgaccctggaccacctgggcggcgaactggggctgtccaaattccacctgctgcgtgccttccagaaagaaaccgggctgacgccccgggagtgggccatgcagttgcgtacccgtcgcgccaaaggcctgttgcgcaagggcgtccccgctggcgaggcggcccacgacctgggcttcgccgaccagagtcacctgaaccggcatttccgggcggcctacggcatcacccctggccactaccaaagcaccgtaaaacgctgaacagcgcaatctggtccaagacaccgcgcctgcacatcctcacactgccccgcctcacttgaaggaaatgcaggcatgctgacgatctttttttatgcactgatattcggttttgtgttttgcctctcccccggcgccgtgctcgcggagaccctgcgccgtggcttgctgcatggctttacaccagccctgctggtgcagttcggctcactggtgggcgatgccgtgtgggcagtgatcggcctgaccgggatcgccctgctgatccagcatgacgcggtgcgtgtgccgttgacggtggtgtgtgcgttgtacctggcctggctgggcgtacgcagcctggtcgatgcctggcacctgccacaaccggacagcgcgcccgccagcacccggcaaaatgccctggcggtaggcgccgcaatttccctggccaacccgaagaacatcgtctactggggcgcactgggcagtgcgctgtcggggattgtcggcaccacgcccagccacgggcagacgctgatgttctttgccgggttcatgctcgcgtcgatcttgtcatgctttctgattgccgctctggtgaacctgttgcgtcagaacgcctcgcctatttggcagcgcatcagttatgccgcctgtggactggtgctgatctacctggcgctgctggcctggcaaggcctctgatcaggccggccagcggcggtgcaggtcgtcgatcacatacacgtgtcggtgcacaccggctgccgggtggaccaggtgcgggtggccggctggcaggtcagggtgctcatgcagcaccatcgcttgctcatgctccggtcgccacaggctggcgcacgcgatcaatgccagggtggccacaaaggccaggctggcaaacgtctgcgacatgccgaagttggcaccgagccagccggccagcgggtacgtcagcagccagcagatgtgcgacaacgcaaattgcgcggcaaacagcgccggccggtcctcggcatgggcggagcggcgcagcaagcgcccgcccggggtttgcgccagggaatagcccagccccagcacccaccacagcaccagcagttgccggtaatccgatagatacacgcctacactgagccccaggatcagcagcccaccgcccgacagcatggccacacggtcgctgaggcgcgccagcaacctcggcaacaccagcgctgccatcatcgaaccggcgccgaacgcggccagcgcaaacgccgtgaagcgttgcggcaaggcaaacccggcttgcaccagcaccacgctgttgacgatgaccatcgcactggcagccgccaccgccaggttcagtgccagcagaccgcgcaggcgcggcgttgcgaggaatatccgcaggccacgggtggtgcggtcatagataccgcgccgcagcttcacctgggcttgcggcaaaagcaccgacgacaccagcaaggccgaaaccaaaaaacccatcgaggtcccggcgaacaggctgtggaagctgatgacgctcaacagcatcgccgccaggatcgggctggccacactttccaggtcgtaggccagacgcgccagggacagtgccttggtgtactgcgcctcgtcggggaggatgtcggggatggtcgcctggaacgtcggcgtgaacgccgccgacgccgactgcagcacaaaaatcagtagatagacctgccacacctcggtgacgaagggcaacgccagcgcgaccagcgcgcgtgtcaggtccaggcccaccagcatcgccctgcgcggcaagcgctcggcaaaggcggccgccaccggcgcaaccccgatgtaggccagcatcttgatcgccaacgcggtccccaacacggtgccggcctgatcacctgccagctcgaacgccagcagccccagggcgacggtggtcaagccggtgccgatcagggccatcacctgggcgaagaacagccgacggtaggttttgttgccaagtacatcgaacatgggcgccccctggcgtgctgcctataggtatttggtcagttgcttgagctcagccagcgaagcctggccatccagcgtcacactgccttcgaggcaatggtcgatatggtcctggatcagcgtgcgcttggcctggcagaccgccttctccaccgcgtgcagttgctgggcgatatccacgcacgggcgctgcgcctcgatcatgctggtaatgctgcgcaaatgaccttcggcacgcttgaggcgtttgacgatggcttcatgggtttggtggacatgttcgctcattgagaggctccttagacgaagcctgatcgtatcccccccagggaggatgctggcaagcccgctcatctccgtcgtcaaaacaattagctcactgctcacaacgctgacttagtgcaagtaacgttacaaccgaagcagaactgaaacaggccttctatctgaacgaactctgaacttgtaatgaattaatacattaagcgttgacatcctgcatcgccctgagtagattgcccgtgcctgcaactggggccttttttaaacctcacaaaagaagccaatggacacagtatctagtcgctgtccgagcaccgccttggcgggcatcgggcgccaaacccagaacatgacaggactcgcctccccggtccggtaagctgcgctagagcttgatgctccaccgtaactgcctcgccggtcgcccgtccggtcccgaggtgtgttatgaccttgctaacccttgctttgcccgatgtacgcacactcgcggccgccctgcgcgccaagctgtgccgcgagcctgtaggcttttcgcctacccgctctgcctttgctgcaccctcccctcaaatgcgcccggctcacccgctggcgcattggcgtatctgccctgacagcggccaactggtccagcactgggatcacgccgaccctcaagacccacagagacccaaggtttccagcctggcccaggccagcttgatgctcggtctgtatgtgagcgctcgcgccgcctgacccggctggaaacagcaacttcctgattattgttctggagttctttatgaacacgtccagtagtagcccgctgcgcgttagttaattaacgcgctgttagcgggcgctgtagaagttatgtgaacaccttatttaaaccgatcgcgaagttagcgactcggcatgctttcgctcgcctgtcatcaggccggtaacgggtatgttttgtcgaaaaattggcgacaggagcacacaccatgagcgccgtaaaaaacgccccattgaacaaaaagagcagcagccacaccgacaccaaactgtcgatgcgtgccgcccgcgaagcccagaacggactgtcggccaccttggccaacgtccgcgccaccaaagacggcctcaccgagctggacgcccaggcgcgcctgcaacgcgaaggctacaacgaagtggcgcatgacaagccgcgtcacgccatcgtgcagttcctgcaggcactgaacaacccgttcatctatgtactgctgaccctggccggcatcagcttcttcactgactgctggctgccgatgcaggaaggcgaagacgccgacccgaccaaagtcatcatcatcatgaccatggtattgctcagcagcctgctgcgcttctggcaggaacaccgctcggccaaatccgccgaagccctcaaggccatggtccgcaccaccgccaccgtgctgcgccgtgagcaagtcggctcccaaccgaccctgcgcgaagtgccgatgcgcgagctggtggccggcgatatcgtgcagctgtcggccggcgacatgatcccggccgatatccgcctgatcgagtcccgtgacctgttcatcagccaggcggtgctgaccggcgaagccttgccggtcgaaaagtacgacaccctcggcgatgtcacgcagaaatccgccagttccatggccgccgaccagggcaacctgctggacctgcccaacatctgcttcatgggcaccaacgtggtcagcgggcgtgcgcaggctgtcgtcgtggccaccggggcacgcacctactttggctccctggccaaggcgattgtcggctcgcgggtgcaaaccgccttcgaccggggcgtgaacagcgtcagctggttgctgatccgcttcatgctggtgatggtgccgatcgtgttcctgctcaatggcttctccaagggtgactggggcgatgcgttcctgtttgccctggcggttgccgtaggcctcaccccggaaatgctgccgatgatcgtcagcgccaacctggccaagggcgccacggccatggccaagcgcaaagtggtggtcaagcgcctcaacgcgatccagaacttcggctcgatggacgtactgtgcaccgacaagaccggcaccctgacccaggacaagatcatcctcgaacaccacgtcaacgccttcggccaacgtgatgatgcggtgctgtccctggcctggctcaacagccatcaccagagcggcatgaaaaacctgatggaccaggccgtggtggagttctcggaacgtaatccgaagttccaggtgccgtttgcctacagcaaggtcgatgagttgccgttcgacttcgtccgccgtcgcctgtcgatcgtggtcaaggatgctgccgacgatcaactgctggtgtgcaaaggtgccgtggaagagatgctgagcatttccacccatgtgatggaagccggcgctgcggtgccactggatgatcgtcgccgcgaggagttgctggcgattgccaacgactacaacgaagacggtttccgcgtgctggtggtggcgacccgtcacattcctaaatccctggcgcgtcagcaatacaccacggccgatgagcgcaacctggtgatccagggcttcctgaccttcctcgatccaccgaaggaaaccgccggccctgcgattgccgcgctgcaacagattggcgtggctatcaaagtgctcaccggcgacaacgccgtggtcaccagcaagatctgccgccaggtcggcctcgatccaggccagccgctgctgggcaccgaaatcgaagcgatggacgacgcgacactgctgcgccgcgtggaagaacgcacggtatttgccaagctgacaccgctgcagaaatcccgggtgctcaaggcgctgcaagccaacggccacaccgtgggcttcctcggtgacgggatcaacgatgcaccggcgctgcgcgatgccgacgtggggatctcggtcgacaccgccaccgatatcgccaaggaatcagccgacatcatcctgctggaaaagagcctgatggtgctggaagaaggcgtgctcaagggtcgcgagaccttcggcaacatcatgaagtacctgaacatgactgccagctccaacttcggcaacgtgttctcggtgctggtggccagtgcgttcattccgttcctgccgatgctgtcgatccacctgctgctgcagaacctgatgtacgacatctcccagctggcgctgccgtgggacaagatggacaaggaatacctggccaagccgcgcaagtgggatgcgaagaacatcggccgcttcatgatctggatcgggccgacctcgtcgatcttcgacatcaccacgtttgcgctgatgtggtacgtgttcgccgccaacagcgtcgagatgcagaccctgttccagtccggctggtttatcgagggcctgctttcgcaaaccctggtggtgcacatgctgcgtacccgcaagatcccgttcttccagagtaccgccgcgtggccggtgttgatgatgacctgcgtggtgatcgtgctggggatctacgtgccgttctcgccgctgggcaccctggtgggcctgcaaccgctgccgatggcctacttcccatggctggtgggcaccttgctcagctactgctgcgtggcccaactgatgaagacgatctacatccgccgcttcaagcagtggtactgatctctcccgccgtttaaacggtggcggtcgcccggccgccaccgtgcactacaaggaaacaccctatgcgcgtcttgatctgtgcaggtcgtcattacgccgacaccaaaatgtcccgccaggtgctggacgcttaccaccgcctgcgcccggtgcaggtattgatccacggcggcaatcaattcctcggcagtgacgtcgaggaatgggcacgggaactgggcatcgatgtggtgcgctacccgcccaactggcaacgccacggcaaacaggcggaacgccagcgcaaccatttcatgctgaccgacagccgccccgatgtggtcatcgccctgcccggcggggacgacaccagcgagctggtgtgccaggccaaagccagcggcatttcggtactgaccgtagaaagctgaattcatgcgaggtgcatcatgcacaaaaaacacaccccagcccgtcaggacgggtttgccaaataccgtgcgcgtcactaccgcggtgcacgccacacgttactgctgctgccaccggccaaacgccgcgcgttgcagcgcaatttgattttcataggcctgaccctgggcatcctgttggcgattgccttgctgtcaaaagcccacgcggccggcggttcttatatggtcgacgacggtgcgatcaacgcgccaggcgaatgcaacgtcgacgcctggtacaccgccaaccgccacgacggcagtacccacacagaaacgctgtcaccggcctgcaccttcgccgcgctgccttcggtgcaatggggcgcggccctgtcgcgtgcaaccagcacagacaagggcgaaacccaggtgaacccgcagctaaaggcccaggtgtggtcgcgggaggatctgggcctggaactggccctgtccgccggcgcgcactttgccctggatcgtcatcacgggtttgatggcgcggacttcaatattccgttgacctggcaaccgctgacacccctgcggctgaacctgaatgccggctggtcccatgcctacaacgatggtgaccagaaacaccgcctgacctggggcaccggttttgaataccaggtggcgccgttgctgacgctgatcgccgaacgctacggccaggaaggcggcgaccaggcctggcaggccgggccccggttgcatttgggcgaattcgtcgacgtggacctggtggtcggccgcagcctgatcggtgatcgggcacagtggttgaccaccggcgccacgctgcgtttctaggccttggcttgttgttccaggtgcagttgcaattgcgggtcgatttgcaactgccctgccaggtcgtccaggtaattgcgttcggcgtcctgctgatcgtccaccagcatcacactggccaggtacacctcggccgccacggccgggtcgctggcaaactcggcgaaatccgcggcatccagcggcttggccacttcggcgtcgagccactcttgcagttgcgggtcgtcggtatgccggcccagctcattggagatcaactgctgctcttgctcatcgatgcgcccgtctgccttggccgccgcgatcaaggcacgcagtaccgcgtggctatgggcttcggcggcggagccgtcgagctggtccaccgtctggaaggcttgctgcggcgcgctggcctgctggcgttgccaggcttgataggcctggaatgcggccatgcccagggaggccagtgccgcgtagttcatcccgccggagcgcccttgggcaggacgagcgcccgtcgcaccgcccagcatgccgccaaggccacccaatagatcacccaggccgccaccggttgaagcattaccggtgctggtgcctttcaataaaccgcccaatagcccaccgaggccaccgcccgaagaagcactgccaccttgcccggcgcgcaagagttgttccagtaagtcgctggtgttcatggtgctaccctcccagggcgcagtgttggcgtttaacaaacatagcccggccttgccggaacaccatgaccgccgggcgggcgcgacttatcattgcgtcaccgcgccttcgagagaacagccacgtgaaccggattgaacacatcgcattgatggccaactacaaccagtggatgaaccgcaagctctacgacgcggccaacacgttgtcggacgcgcagttgtcgacggatcgccaggcgtttttcggctcgatcctcggcacgctgaaccatgtggcgctgggcgacaccgtgtggctcaagcgctttgccgggcatcccgccgggtacacagcgctggcgccgctggaggcgattgccgcaccgctcgacctgaggcagttggcatttgccgatatccgcgaactggccacccaccgcgcctggctggaccaactgatcatcgactgggcccacaccgtgcgcgagcccgacctggatcagcgcctgcactacagcaacatgcgcggcgtcgcagccgacaaaccgttcttcggcctgctggtgcacttcttcaatcaccagacccatcatcgcggccaggccaccaccctgctgagccaggtggggctggatgtgggcactacggatttgctggcgctgatcgaatgaactcggcgtacgcctgcagcaagcgcggaaattcctgaggttcgggcaattgcgcaaagctttcaacggcgggcgtggacacccagggcaatttttcgcgggtccaggtttccatgaaaggtacgtaatcgccggcgttatccagcaacgtcgcacgcacgttgacgaactcatcgatgccatggggacgggtgaacagccagctcatgcagtgcgggcaaaagtaatgccggtccacgccctgcaggccgccgatcaccgggcagccctgggtcaccgtaaaaccgctggcgggaatcaacgcgctcaaggagaacgcgctggaggacatcttctggcaaccggtgcagtgacaggccatggtgatcactggggcagcactcacgctgaaacgtacacgttcacaacggcagctaccctcttgcggcagggtgtcggcactcatcatcacttcctttcatggatggggtgggtggcaggttaacgtccgacctcgaccttgaacaggccatacacccaaccgaacgctgagctgcacctggggtcgtaaccttaggtgccggggttttactaccccgccctccccgcgtgcatcgtgggtctaccgatgcgcgtacccccaagaaggagacgcttacatggtcattcacttcaaggtcgccggccacctcgcctgtggtcaccacggcaacaacctgccttccagcaacgagctgaaccgggtcaaatgccgtacctgccgcaataccgaagcctacaaggaagcgcgccgcacccagcgcaatgccgcccgccgtgccaatcgcaaggccaagagccacaccgccgtcgactggcgcagtgcatggacacaacggttgacggacttgccagggttgcagcgtttgccacggggatttagtggtcagccgtttgtataagccgcacatgcaaaaaagccccggatgatccggggctttttttgttcttaaaaaagataagggcctgcgtcaggtttccccggcaagcccttgatatctatggtgcccgaacccggaatcgaaccgggacgcccttacgagcgggggattttaagtcccatgcgtctaccagtttcgccattcgggcggcagcgcgtgttgcagggttgggaatatatagatcccttcgcctcgatgcaaggtcgcaagacagctttatcgcacaactggacgggtgaaaaaagcttgttagatcagtgatctagattagcttttggaagccagtccaagagacctgttgctcggcaacccgccagctctggtactgtgacgcccccaacggaatggacacatcgcagaatggactcacgcaaggtatttacaatcattgccctggcagtgctcggcaactcagccgtggccgccgagaacaacaacccgtttcaggccgcgctgatgctcacgtcggtcgctccgtttgtgctgacctccggcgccctggcgttaacctccgctattcctgacctgttcaaatcctccaaaagcgatgcacttgcgtatatcggctcagggggagagatccgtggggcgcagtttgaacaggcatcgcgctactaccgttcaaactacactgcccccctaatgtctgacatgcagttggcccaggccattgccacgactctctgacccttcagcccaacaaggaagtcatcgctgatgcacaagtcccctacctggctacacacaaccctgtcgataccggtctacgcgactgcggtcgtgttttggatgttgaccgtctacctgatcgtcactgcgtcggtgaagatgctttcccgatttgtgacgcccgagcagattggcgaaggggtggccaacttgctcgtagccgttgccctggccgcattgggtagtggcctgtggaaactggccaggtatgtccggacgtcatccttcaaaaagccggcgaaggcgactttgacgtaactattctgtaacagacgcagcgtctggcgctggcttcttgagcgccagcgctggatcgggcacctcgacccagcccttcttcagatactcacctgccacgattttacgtatcaggaaacagtagatgatgggcaatactgcaatcggtatcgccgcccagggcgggcctgccaagaggcccagtccgagggcggccccccagatcagcaagtggcgccaaaggcccgcgaagagcaggtagagagggccgagaaacagtacggccaggacctgaaaggcgtcgacctcttcaacctggtcactgtccggatgtttgaaatagcgggtcattgcactgtccttgtggggtgagaagcccgaagaatctaacactggagaccttgtattcctactgaaccatcagcctttcctgacgagcctgcgggtcgctgcccattgatgttgaagccgactatgctaaggcgatgtgcctgatccgagacgtcaggctcgcccgcctctggttccccagcggctggtagcggaatacccgcagtgatcccccctatcggagacccgagatgaatcccaacgccaccgcccttgtcctgatcgaattccagaacgacttcaccaccccgggtggtgtgttccatgacgcggtcaaagacgtgatgcatcagtccgacatgctggccaacaccgccaccaccgtgcaacaagcgcgcacactgggcgtaaagatcattcacctgcccatccagttcgccgaaggctatccggagctggcattgcgcgactatgggattctcaaaggtgtagccgacggcagcgcgtttcgtaccggcagttggggggccgagatcagcgagtcgattacccgtgaacccggggatattctcgtggaaggcaagcgcgggctggatggttttgccaccacgggcctggacctggtgctgcgcaacaatggtgtccagaacctggtggtggccgggttcctgaccaattgctgcgtcgagggcacggtgcggtcaggttatgagaagggttacaacgtggtgaccttgagcgactgcaccgccaccttcaccgacgaacaacaaaaggccgtcgaaaacttcacgctgccgatgttttcgaaggtgttgcgccataccgagtttcttggggcgttgagcgcccagtaagaaaaaagggagcgactgatcactcagtcgctcccttttatttcatccgtcgagtggttttatccgttgagcgtcaaccccggataagcccgcaccggcaccttgtgccgctgcggttgctgccgggcaagctgcgcctggacctgcgcaaccgcatccagcacgcgttgcgcccactgctcgtcttccgggtcgacgactaccacgcgaaaaccatggtcgacgccttcaagctgcacgccctcggaatcatcgacatgcaagtcgatatcgaaggccggcgggaatttcgacggtgtgctcgtcagcccacgctcggtgagagcctggttgtgtcgcacgctgttgaccacgccatccacatggatgccatacagcagcaaccaacgacggatgtaggacggcgtgcggcccgacgaagtgtagacccacacgctgcagccctggcggcgcagctcgcgggtcagcttgcgggtgccgctgcgcagcggctcacccagccaacggtgcacacacgccggcaagcggctgtgttcggtcgcgctgtggtgcagctggcaggccagcgtgtcatcgatatcgaacgagatacggatgcgttgacgcttgaacacccgcttgattgtgtcgagcactgggtaccttcccatcattgatttccctgatacacaggcacaggtgtgtcgctcaggaaaaactccattggatcaggggccttatcttccaggaacgcggcatattttttcttgatcttgggcaattcgtacaaggccatgacgccatgcttggcggagttgcgtatgaccgaggacgggttgaaatagccctcggcgttgtccagcgtcaacacgaacggcgccaacccctcgcgcatcaacaggtagctgacgatcagcgagccactgcggtggttgccttcaatgaacaactgcggcttgctgaggacccgcacatacaccccggctgcgcgcttccacaccgactcgctgtggtgcttgcagtaccagttgtacaaatccttgatgccaccttcgacattgttgaaaaaatgcacttcggtggccgccaggtgctgggcgtattcacgcctgcgtaccgggtccgtgccgcacagcacggtggcgttgatctccagcatcaggttcagctgctgaaggtcgaacagatcgataccgcgcgccacatagtcgtcaatcagggcgtagccttcaagcacattctgcagcacttcgtccgtcagcgggtcgcgtggctcggtaaagtcccggctgagctgggcaaaacggctctggacctcacgcagggcgcgttcgatggcgagcaaatcaagacgacgtgttgcagtcattggcaatcctgaaaaacgatgaatagcgggtcagctgaacttgccgctgatgtagtccccggtcatttgttcgcgcgggttttcgaagatctgcgtggtcgcgcccatttccaccaggtaaccggtacgggtgccctgggagatgtccaccgagaaaaacgcggtggtatcggccacacggatcgcctgctgcatgttgtgggtgaccagtgcgatggtgtagtccttcttcaactcgaccatcagctcttccacccggcgcgtggcaatcgggtcgagtgccgagcagggttcgtccagcaacagcacttccggctcggtggcgatggcgcgggcgatgcacaggcgctgctgctggccgccagagagcgacaggccgctgaccttgagcttgtccttgacctcatcccacaacgcagcgccttgcagggcgtgcttgacgcggtcgccgaggtcgcccttgtagcggttcaggcgcaggccaaaggccacgttgtcgaaaatactcatcgagaacgggttcggctgctggaacaccatgccgatgtagcgacgtacgaccaccgggtcaacgcctttgccgtatacgtcctggccgaggaagtgcacatggccttcgaaacggaagcccttcaccaggtcgttcatgcggttgaggctacgcagcaccgtggacttgccgcagccggacgggccgatgaaaccggtgatcttgtttttctcgatcggcacatggctgtcacgcaccgccatgaaattgccgtagaaaatcttgtccagcttgcagtccatgaccacaggcgactgggtgataaacggagcggctacttgcgcagttgacatgttcaaaattcagatgctcccgttcttagtacttgggcttgccgaaaatacggctcacgatattcacgaccagcacgatcatcaccagcaccaacgaagccgcccaggcgagctcaagctggttgtcgaacggcatgccggagaagttgtagatcagcacggccagggacgccgtcggattcatcaccgccaggctgccgtcgtggtagatccagtagttgctgaacagcgcggtgaacaacagcggtgcggtttcgccggcggcgcgggccacggcgagcatgacgcccgtgaggatcgcgggcatgccggtgggcaagacgattttccagatcacctgcgagcgggtgcagcccatgccgtaggcggcgtccttcatgatcttgggcaccatcttcatcgactcttccgccgtcagcaccacgatcggcagcatcagcacggccaatgccacgccaccggccggggccgagtatgtgccggtggtcatcaccaccagggcgtaggcgaacacgcccgccaggatcgatggcaagccggtgagcatcttggcggcaaagcgcgaggcgttggccagcttgctgtccggccccagttctgcaaggaaaatcgccgccaggatgccgaccggcaccgcgatggcggcagcgataccgaccatcacgaaggtaccggccatggcgttgccgaagccgccgccagtctcgaaaccggtaggcggcagttcggtgaacacttccaggctcaggcgcgcaccgccacgggtgatcagcatgtagagcacggaaatcagcggcacgctggccagcagtgcgccgaaccacaccagggtggtcagcaccaggctgcgcagggcacggccctcgaaccggcgctgcaggctcggcatggccgtcatcggcgtagaaaggtcagtcattatttagtcccccgctgggcgtagaccatgatcatcgaaccgatgatgttcaccagcagcgtgatgaacatcagcaccagggcggcgtacatcaacacttcgatctcgttggggccggcttcggggaagttcagcgccaacagggccgccaaggtgttggccggtgcaaacagcgacagcgagatgttattggcgttacccaccagcatggccagggccatggtttcacccagggcacgaccgaggccgagcaccagggaaccgaagatgccggtcgcagcggacggcaccatcaccttgagaatcgcttcccagtgggtggtgcccatgccgtaggcggcttgcttggttttcatcggtacacccgtgagggcgtcctgggaaacggcagcgatggtcggcaggatcatgatcgccagtaccaatgcggccggtaacaggcccggcccgctgagggacgtgccaaaaaaaggaatccagcctagttcagtgttcagccacgcagtcagtgggcggatggccgggatcaccacgtagatgccccacaggccgtagaccacgctggggatggcggcgagcaattcgacgatggtgcgaaacaccgccgccagtttggctggcaggaaatcctgggtgagaaaaatcgccatgctgacgccgaagaaacctgcgatcagcaacgcgataagggcgctgtaaagcgtgccccaaatagctggcaaaatgccgtacttgccttggttaacgtcccagacactgccgaacagcacgtcgaaaccgtgcttttccatgccggggagtgccttgcgccctacttcgaagaccagcgcgaagaccagcgccagcaccaacaccacgccgatgcgtgcaagcgcacggaaggtacggtcaaccacgaaatccttggtagagggtggctggcacgcagaatccgggttgaccggtacgacaaagggtttgttcattggttgattccggaacaaggggggatcgctcccgacatggctgaccgcccatgccgggagtggcgtggcgagccttactggatgttggcggaagctttgcgaacttggtcgactaccgatttaggcagcgggatgtagcccatcgagtcggcgattttctggccttcggtcaagctgtactcgaccatttcacgcatggccttggccttggccgggttgccgttgtccttgcggaagatcatccaggtgtaggaggtgatcgggtaggacttggcgccatccggatccggcagccaggccaccaggctttccggcatcttcaccgcagccagggcttcggcaccgctttcggcgtttggtaccacgtacttgccggccttgttctgcaactgggcaaagtcaaccttggccagtttggcgaagccgtactcgatgtaaccgatggcgcccggggtctggcgcacggtggcggtcacgccgtcgttcttcggcgacttgatgaacttgtcgctggcaggccagttgacggtgttgccttcgcccaggtctttctggaactcagggttgatcgccgacaggtgcttggtgaataccgctgtggtgccgctggagtctgcgcgcaccaccacggtgatcggcagctctggcagtttcaggccagggttggcggcagcgatcttcggatcgttccacttggtgatcttgcccaggaagatgttggagtacacgtcgcgcggcaacttgagctctttagggttgcccggcaggttgaaggccagcacgatttcaccagcggtcatcggcagcagttgcacgccttcggccaccttggcgatgtcttcgtctttcatggccgagtcgctggcggcgaaatcgacggttttgttcaggaagtcctgtacacccgcaccgctacccttggactggtagtcaacggtgacgccctcggttttcttgctgaaatccttgaaccaggtgaggtagatcggcgcggggaagctcgcaccggaaccggtcagacggatgctctcggcagcaaacaccgaggtggcactgagagaaaccgcaacggcgagtgcagcagacttcatcagacgtttcattcaggaaaatccttgtgaattacgggctggggaactctgcaacaatcttgttacggttttatgaacgtggagtggcaaaacgcctggttgtccccctctccccccgcaatcaggcattttgacgtcattggttcgtaacaaattgagactaagactttgccatctcccaccacgcgagctccgtccatgtcctcgatcgaagacgccttgatgcaacgcatccaccgtgaactgctggatcacagtgacgaagagctggaactggaattatccgaagacgggcacgacctcaatgcgctgtttgacgaacatgtgggtgaaagcgccgaaaaaaccgcacgccgcatatacttcagcgagctgttccgcctgcaaggcgaactggtgaagttgcagagctgggtggtcaagaccggccacaaggtggtgatcctgttcgaagggcgggatgccgccggcaaaggcggtgtgatcaagcgcatcacgcagcgcctgaaccccagggtctgccgggtggccgccctgcccgcgccgaacgaccgcgaacagacccagtggtacttccagcgctacgtctcacacctgccagccgccggtgaaatcgtgctgttcgaccgcagttggtacaaccgcgccggcgtcgagcaggtcatggggttctgcaacgccgagcagtacgaagagttcttccgcagcgtgccggagttcgagcgcatgctcgcccgctccggcatccagctgatcaagtactggttttccatctccgaccaggaacagcacctgcgttttctcagccgcattcacgacccgctcaagcagtggaaactcagccccatggacctggaatcccgtcggcgctgggaagcctataccaaggccaaggaaatcatgcttgagcgcacccacatcgccgaagcgccatggtgggtggtgcaagccgatgacaagaagaaagcccgcctcaactgcatccaccatttgctcgggcagatgccgtatgaagaagtgcaattgccggtaatcgagttgccacagcgtgtgcggcaggaagattattcccgcagccccacgccgccggagttgatcgtgccgcagctctactgagtcagctgcaagctcgcccccgcaattacaggggcgagttgctcaccacccgcagcgccaggccctcataggcatccagcgtgatcgtaaactcgccttccgccgtcaagtcaccctcgacccgctcattgatgatgtccaccaccatgcccgcgccaatatccggcaaatgcagggtttcggtgatgggcgtggcaccgaagttcagcgcggtgatttgtatgcctttaccggccggcaattcatggaccatcaccagcagccccgggttttccacttccggcacctggatctggcggctggcggcgatgtcataggcacggcgtaccgcgaggattttttgcagctgcgaggcaaacgactcagggtcctgcaactggctgttgaggctgccatacaagcttttcgagcgcggcatctggccggcggacaattcggcatccgggttcaaatccaccaggtcataagcaccgcgatgaatccagcgcgtatcgccgtcctgcatcaagtgttcaacctcttcggccgccagcggcagcgcccccaccaggtcccagcccgacaaggcaaacacccccggctgcatggcgttgtacatcaccaacagcaaatggatctggcgtatctgctggatatccgcttgggtgatggcgtccaggtcgcgaatccccagcgccgccgtgatgatactgacggtggtgcaggacacgccgttggtgacgaacttgaggttgtacggtgcctgttcgccggccaggcgctcgtacatctgttcgcgaatgtgctcgcgcaggatgttcccgggaaaggtctggccctggtacaggaaagtgtcatgggcatgcagggtccagaagtgcaccagttccagggtcagttcatcgtggttctgcaacgcgtggatcagcgagccagggtcgatgccctggcggtgcatttcgcgcagcatcaggcgcaggaactcggcgtcgcccatcagcaacgcgtgctggtaagcgggacgggtgatgaagtcataggacaggtcggcgccgccatgggacatggacgcgatgtcgtccacggtgaggttcaactcctggaaactgaagccgccggccttgcgaatcgccccgccgagcaactggttgccggtgatcgacagcggatggctctcggaccaggccgtgccgtccagcttgcgctccacgccgaggaaaccattggcgtccaggcgcaggatcttcgcccccatcacgtcgatggcgtgcaatgcgtcgccgatgatcatctgctgcgcggcgaaagtcgggtccagccagttcagcgatggctggccttccttgaagtaatgcaggtagacccagcgacgcggcttgccatccacgcccagcaccacgtccgtggcgctccagtcggtttccttgacgccgggctcgaagaagatcacccgctgcagctggccgacgatgtagtgcttgtcacgcaatgcatcgacctgcgccgggctgaggttctgcgcatcgcggccctcggcgacgtcgggcagcaacgaccagtcttcttcgcggatttccaccatgtggtacaggccggggtagtcctcgtacgccatctcggccaggcggaagtccgcgcccttgccggtgtgggacgggatcacatcgtcgatgatcaccgcattgtgcgccgcggccatgcgcgtcaacgcctgcaactgcgcctcggtgcccagttgcgggtcgatctcgaaactgatgcggtcgaaattgccgtcgatggtcggcgtgtgctgtgtaccgctcaaaccgccggattttttcagcggaccgttatggatgccttggatgccgatcttcgacagcgcatgccacaacgcctcatccccaagcgcctccaacaccgtgccgccttcgcgggtcacgattgaggccgggtaggcggtaaaccataccgacgacaacgccgaagcatcccggggccgggtctgcgcgtaaggctgctgccacaaccggccctggcccgagtagagcttggcgcgctggcgggccgcgtgcagcatcgattgttccaccagccagttcacatggttgttttcagccgcagtcataagcgtggtacctgtcgtcgtggatgagtccaacgcggcagtatcaagtctcgataacaccgggtgtagtcatatgaggcgtcgaggggctattcgttgcattgaatgtggggttgcgtcgttcgaaatacgcagcgtgctccggactcgcatggagatggacgaactccctcatcatctcggaatgcggcagaaaacttgaagcgacaagcatgccccagcgttcgctcgggatcgtgttcaacatttcagtggatttcagtgtggtcgtcgaaaacaacctcaacaacacttcatcagaaatcacagcctgttttagtaaatacagttgtagtttgtgatggtcatcgggatggagttgccagagagaatcccccaagacctccaggttcaggaggatgaagttgttcagggcagctcttttctccctgttgtgacgctccgccttggtgtgaaaacgcggcgtgaggatatcggtattcgctcgaaaatatgtccagacggcttcagctttgtcactgaccctatcggcagccatcagccgcacccacagactcatggaggcgctttcaagtgtcgcgaattcgcagtctgtgcgatccagcaaggatctgacccactcaggctcggcataaatagcagtaagcaacgcggccaaagactctgctgactcatccaacatgccagtctggctgagtaattgctggaccagtctctgtgggtcacgctccaacaacgtttcgatcccctccagtcgcaacgctgtcagccgacggtaagttacaggcgactcctgttccgagcccaactcaaatgacgcgcatatcaaacgaagcattttcagttcaggcgcgataaacccccagctcaccaactgcttgaggtcatccgccgcgacggcatcactgaggttataaaattgcacaggatgttgacgcaaccagccccatgtggcctcgcccttggcaagcagcgacacgacatcgctgacatcctgcaacccttcaaggctttctagcacgccgtggtcgcagtcttccagtgcgctgatttgctcaggagccaagctgctgactattgcgcagaccaacgcctgctttggaccgctgtccacaaaacgttttgacgagaacagcccctcaagagactcagggtcggtgtcgtagatagcttgaatcaaggcgggggcgttttcacttgtcaggatggaatccaccacactggcaaagcgtggcatgaattgcgctgccgtgctgaggatcgcgttcagcttccacccatgggtaccgtggtccgcagccgtgtattgactgcacaggtaatcgaccaaccctgcaatcaagccgcgcccctcccccaacgctttttggtcaagtttgccgagcaccctctccgggttattgacgactgtcatcacctctggtgactcaccaccgcgcagggccaggatcaggttcttgtcatcctgcgtgagcgacccttcgtagaagaacccttggtaatcgtagtagtcggtgtcgaaatatccttcacgcatcagataaatcaacgcttttatagacccgagcttctgagtcagtacttcgccatactcggcccttgcagcctctctgaaggacatgcgctggatgcggatgctctgattgttcagcgcttcgattttcctggtaaaaacctcccgctcagccgtcagtcccgaagcgcgttcccggtatgacgtcaagtgcaagacgcgctcactctcaaccgtttttacctgagtgttaaagttgatgtgatggcgactttccatggacagcttccggtttttcttgatcatttcatcaaaaaactcgtcttgtacaaactccgtcaacgtcattgtcacttcgttgtcgtacgtgagatcagtggtgtccacgggattgatcagcttgacgacctgataccaaacgcaaaccctcagctcttccagactcgcaaggtgttcgcgctccacaatcgccagttgctctcgcacgtcagatatctgcgcatcaatctcttttgcctgggcaatacgccaatcaccaaactcattgaagacagaaaaaatcggcccgcgccgcttgagcagctcggcacaggcctccgggtacaagttgcgcacggccaccatcgccaacagtttgttaacgtccagtttcacgccgcgaccacccagcaggctggagaacaggtccagctcgttgatgatgttcttgatcaaccgcatatcgtcgatgtagtaacacaccgtctcgatcagcacagggtcgaaacggcgaattgaatcaaagcgttttgccttgagcaggtccatcatcttttcctgcgagttctccgagttgactacgggtaccacgggaatgatcaggtcaaagaactttgcctggtcgtcagcgaagaacagttcatcgcgtattgcatagatgaagtgcacgggacgcttgatttgtggtgattgcttgatggtgaagttgatttcgcgcaggcgaaaaaacacgtcctgaatgccaaatcgatcaaggtcctcgatcacgacgacgttgatatcactgcgttcgaaacagtagatgatctcgtcgacatgcttgtgcagcactgaaccatggtgaagggattccagtttcccgcctttgagggtcagcccgtcgatgctgaaaagcgacaagtacttcaaggcgcaatacagcaagtacacacccgcagccaggacgaacgccagggtccaactatccggcacccacaacagttgagtgataagccaatcgggaacgtatttgggcataggatcgacgaaaggcaggtacagccgcacaccacaggcaaccaacagggcgaagaacaccgtatgaaagaggttgcgggcattcgaggcgtgtacgatgcgtttcaaccgcgtttttggcaccttacgcgcaggtacggcgtagagcagctgctggacgatggtctcctcaatgcgtggcatcagatcatcgtttttggccggcggttcagccggcgatactgcacgctctgccgggttgtcttgactgaacgtggcaagggagacgaatacaggctcgtattcggggtgacgatcaaaaaaagtcctgatcacgctgctcttgcctgcgccgtacccacccgttatcgcaatgttgcgaacctgctcgttttcgagcgcgtgcagcaactcactgacatagcgatcagcctgcgccccctcgagcaatacaggcgtcaagtctacgaaaccttcttcactcaagggtatcgccttgtgcgctctccataccttgaggaaggcgctgatgctccgtttaaacctgatcactattccttgagtcactgaatcatcctttaacaatctgaggtgcggcatgaaagcgcccaccatgatagctcaatgccatcctcgcagtcctgcaatccatctcaacgtactcgctgggttccacacacagcggtgttgccatcgccagcaagccggctcctacagaaacgcttcattcagcgagtgtcccgatactgcctcggcgtaaaccccgtcgaggccttgaactgccgagtgaacgcactgtggtcggtgtacccgcactgcagtgccacctcggtgatcggcaggtcgctgtgcaataaccggtgggcgtgttccagccgcactttctggatcatctgccggggcgtgaggtggaacacgcgcttgcagtaacgctccagctgcgccacggaaatcccggcgatgcgggtcaactcacccagggtgacgcggcggttgaagtgcgcacggatgtgcgcgtccacggcggccaggcgttgataggcggggtggctctcgctggcggtttgcaaatcgaccgagatgccggccaggccgatgatcacacccgtgtggttgtacagcggccacttgtgggtcaggcaccagccgggttcacgggtgccatacaggtgcagttcgagctggtcttccagcacaaagccctgttccagcacgcggcggtcctgctcggtgtaacccggccccagttgtgcggggaacacttgtgcgctggtcttgcccagcagcggttgcagctgcttgaggccgcagcgttgtaccaacgtacggttggcgaggaggtagcgggcctgggtgtccttgatgaaaatcgccgcattggggatcacatccagcatcggcaacagctgcaccacaccggccaggaactgctcgatgctgtggggtcgattggcctcatccccttggcacagggccgcaaacgcagtctgcaacatgactttcgatcccctgttgaatgcctcgacgcacgcagattgcccgatggtttgagcgctgtcgagccacgaaaactgtgccgatttcgtcaccgatctcggcaaaaaacatcaatcgcgccgccgcccgtgagttcactgtatggccactgcatgcctatccaataactcacaagaaggcgacgctatgtcaggtcaaggcaagttcaagaaacaactttcattgatggacctcacctttatcgggctgggggccatcttcggttcgggctggttgttcgcagccagtcatgtgtcggccattgccggcccggcgggcattatctcctggctcattggcgggttcgcggtgttgctgctggggattgtgtactgcgagttgggcgccgcattgccccgcgccggtggcgtggtgcgctacccggtttattcccacggcccgttgctgggctacctgatgggctttatcacgctgatcgcattttccagtctggtcgccatcgaagtggtcgcctcgcgccaatacgccgcggcctggtttcccgagctgaccaaggtcggttccagcgacccgaccaccctcggctggctggtgcagttcgccctgctctgtctgtttttcgtgctcaattaccgcagcgtgaagaccttcgccatagccaataacctggtcagcgtgttcaagttcatcgtgccgttgctggtgatcggtgtgctgttcaccttcttcaagccggcgaactttcaggtgcagggttttgcgccgttcggcctgtccgggatcgagatggcggtttctgcgggcggggtgatttttgcctacctggggctcacaccgatcatctcggtggccagtgaagtgaagaacccgcagcgcacgattccgatcgcgttgatcctctcggtgttgctgtcgaccgcaatctacgtgctgctgcaaaccgccttcctgggcggcgtgcccacggaaatgctcgccaacggctgggccgggatcagcaaggaactggcgctgccctatcgggatatcgccctggcgctgggtgtgggctggctggcctacctggtggtggcggatgcggtgatctcccccagcggctgcggcaacatctacatgaacgccacgccgcgggtggtgtatggctgggcgcagaccggcacgttcttcaagatcttcacgcgtatcgacgagaagtccggcatcccgcgcccggcgctgtggctgacgtttggcttgtcggtattctggaccctgccgttcccctcctgggaagcgctgatcaatgtggtgtccgccgcgttgatcctcagctatgccgtggccccggtgaccgtcgccgcactgcgccgcaatgcaccgcagatggcgcggccgttccgggtcaagggcatggccgtgctcggtccgctgtcgttcatcatcgctgcgctgatcgtgtactggtccggctggggcacggtgtcctggctgctcggcctgcaaatcctgatgttcgtggtgtacctgttgtgcgcgcgctgggtgccgaccgcgcacctcgacctcaagcagcaagtgcgttcctcagcctggctgatcggcttctacgcagtgaccatcctgctgtccaagctcggcagttttggcggcatcggtgtgctcagccatccgctcgacacccttgtggtcgcggcatgcgcactcggcatttactactggggcgccgccactggcgtgccagctcacttggttcggctggaacacgaagccgatgaaagcgaagcggttgacgcgcctcacgccccgctgacgcctgcgacttactgattcaggagcgttttatgaagcgattgcacgtgatcgactcccataccggcggcgaaccgacgcgcctggtgatgagcggttttccggcgctggaaggcgtcacgattgccgatcagctgcaccacctgcgcaccgagcatgaccaatggcgccgcgcctgcatcctggagccgcgaggcaatgatgtgctggtcggcgcgctgtactgcgcgccggtcacgccgggcgccatctgcggggtgatcttcttcaacaacgccggctacctcggcatgtgtggacacggcaccattggcctggtcgcgtccctgcatcacctgggtcgcatcgcgcccggcgtgcacacaatcgacacacccgtcgggccggtcgcggctaccttgcacgaagacggcgcggtgaccttgcgcaacgttcctgcctaccgctatcgcgagcagatcgcagtgctcgtgccgggtcacggcatagtccatggcgatatcgcctggggcggcaactggtttttcctggtgtcggaacatggccagcgcctgcagatggacaacgtcgacgccctcaccgactacacctgggcaatgctcaaggccctggaagaccaaagcatccacggcgccgacggtgcactgatcgaccacatcgaactgttcgccgacgacgaccacgccgacagccgcaacttcgtcatgtgccccggcaaagcctacgaccgctcgccctgcggcaccggcaccagcgccaagctggcctgcctggccgccgatggaaaacttgcgcccggcgaaacctgggtgcaagccagcatcaccggcagccaattcgcaggccgctacgaatgggacggcgaacgtgtacgccccttcatcaccggccgtgcccacatgaccgccgacagcaccttgctgatcgacccgcaagacccttttgcctggggcatctgagccctccccctactggaaactggagtgaacaccatgagcgacaacatcttcaccggctgcatccctgccctgatgaccccgtgcacgcctgagcgcaagccggacttcgacgccctggtcgccaaaggccgcgagctgatcgatatcggcatgagcgccgtggtgtactgcggctccatgggcgactggccgttgctcaccgaggccgaacgccaggaaggcgtggcgcggctggtggcggccggtgtaccgaccatcgtcggcaccggcgcggtgaacagccgcgaagccgtggcccatgcggcccacgccgccaaggtcggtgcccatggcttgatggtgattccgcgtgtgctgtcccggggtgcctccgccaccgcacaaaaggcgcacttctcggcgatcctcaaggccgcgcccaacctgccggcggtgatctacaacagcccgtactacggcttcgccacccgcgccgagctgttcttcgaattgcgccgcgaacacccgaacctgatcggcttcaaggagttcggtggcggtgccgacctgcgctacgccgccgaacacatcacctcccaggacgacagcgtgaccctcatggtcggggtcgacacccaggtggtgcacggtttcgtcaactgcaatgccaccggtgcaatcaccggcatcggcaacgcactgcctcgggaagtgctgcaactggtggccctgagtaaaaaagccgccaagggcgatgccaaggcccgtcgccaggcgcgtgagctggaagctgcgctggcggtgctgtcgtccttcgacgagggctgcgacctggtgctgtattacaagcacttgatggtgctgaacggtgacaagggctacgccctgcacttcaacgaaaccgatgccctcagcgatgcccagcgtcgttacgcagagaaccagtacgccctgttccgccagtggtacgccagctggtcggcggaacagaacgtcgcctgacccttcgcgcgccgctgcgacgctcgcagcggccaaccctcttttttccaggaaatccccatgactctgacgggcaagatgctgatcggtcagcacgccactgccggcactcgcgaagcgatccgggcgatcaatcccgccaacgataccgccttggaaccggcctacctcggcggcaacggcgagcatgtcgcccaggcctgcgccttggcgtgggcggcattggatgcctatcgcgaaacctctctggaggcgcgcgccactttccttgagaccatcgccgcgcacatcgaggccctgggcgatgaactgatcgaccgcgccgttgccgaaaccggcctgccccgcccacgtatccagggcgaacgggcgcgcacctgcgggcaactgcgcaccttcgcccgcaccgtgcgtgccggagaatggctggatgtgcgggttgataacgcacaaccgcaacgccagcccctgccccgtccagacctgcggcaacgccatatcgcgctcggcccggtcgcggtgtttggcgccagcaactttccattggccttttccgtggccggtggggataccgcctctgcgctggctgccggttgcccggtcatcgtcaaagcccacggcgcgcaccctggcaccagtgaactggtgggtcgtgcggtggcgcaggcggtcaaggcgtgcggtctgccggagggcgttttttcgctgctgtacggttcgggccgcgaggtgggcattgcgctggtcaccgacccgcgcatcaaggccgtcgggtttaccggctcgcgcagcggtggcctggcgttgatccaggcagcgcaggcacggccagagccgattccggtctacgcggagatgagttcgatcaacccggtgtacctgtttccggcagcgttggcggccaggggtgaagcattggcccagggttttgtggcgtcgttgacccagggcgccgggcagttctgtaccaacccggggttggtcattgcggcgcaaggcccagccctggatcgcttcatcagcctggccagtggcttgctgccgacctgtggggcacagaccatgctcacgccgggcattgccagtgcctacgctgcaggcgtaggcgaactcgctgaacatgcaaaggtggccgcaaagggtttgccggtgacaggccccaaccagggccaggcccatctgttcgtgacccaggcgcaggcattcctggccaatgagcatctgcaagcggaagcgttcggcgccgcgtcactgctggtcgtctgcaccgacaatgaagaagtgcgccaagtatccgagcatctcgaaggccagctcaccgccacgttacacatggatgagaacgaccttcccgaggccaaggcactgctgccggtgctggagcgcaaggccggtcgcttgctggtcaatggctggccgactggcgttgaggtgtgtgatgccatggtccacggtggcccctccccggccacctcggatgcgcgcagcacatcggtgggtacggcggcgatccagcgtttcctgcggccagtgtgttatcaggatttccccgatgcattgctgccggccgcgctccagcacggcaacccgttgctgctgcgacgcctgcttgacggccagagagaggcataagcgatgtccgatcccgatatcgtcgtagtcggcgccggcatcattggcgtcgcctgcgccctgcaactggcgcgtcagggccggcacgtggtggtggtcgatcaacaggaacccggcatgggcgcgtcctatggcaacgccgggcacctggctaccgaacaggtgttcccgattgccgacgtgtcgatcctcaagcgcttgcccggcatgctgctggaccccatgggcccgctgcgcctggattggaaatacctgccgcgcgccctgccctggtttgcgcggctgctgttgaacctgcgtccggcgcgctaccagcgtaccgtcgcgggtattcgtgcgcttaacgaaggcagcctggacgcctggcagcgcctgctgcacagcatcggacgtgcgcacctgctgcgtgaagacgggtcattgttggtgtacgaacgagcggactcacgcgacgcactccaggccttgcagcagcgcatgcaagcgcagcaggtgcccgtggcgttctggaccggcgatgccattcgccaggctgcgccgcagttgagcgagcgcatccagggcgggctgtttttcccgagcaccgggcacttcctcgacccgtaccaggtggtgtgcgaactggtccaggctgccaaggccagtggcgtagagttcttcaagcgccaggtactggatggacgggttgaggaacacggcgtctccctcaccaccgatcagggcaccctgagcgcacgccaggtgttgattgcgtgcggcgcccactcggccaaattgaccgctgccctgaccggcaaaaaggtcccgctggacacggaacgcggctatcacctgatgctgccccacgagccgcatcgcctgccgtttgccgtcacctccctggaacgcaaattcatcatgacccccatgaccgacggcttgcgcctggctggcacggtggaattcgccggcctgaagcgcccggcaaatatgcagcgtgcctggcagttgcatcggttgagcaaggggttgtttcgggatgacctcaacgcagagggtgccacaccgtggatggggttccggccgtcactgccggactcgttgccggtgattgaccgggtgtgtgacgggaaggtgctgcttgcgttcgggcaccagcatctggggttgacgcaggcggcggtgacggcggagatgattggggaattggcgagcaagggtcaaacaccgttactcacgccttatcgcctcgaccgcttctgaccaacgcgtttttttgcggtgagttgcctgttgtggcgagcgggcttgccccgcgttgggctgcgaagcagccctgaaaacaaacaccgcgctctgtctgacaggcggcggtgttttctattgggggacttaatcatggggtttgagcagccgtgctgtagagtgcgtcagccatttcctcaatttcatcacgcatacaaagcttgttcagccaacccgtcgggatgccttgcacgccgtaatatgcacccgccaactgaccaacgatggcggcagtagtgtcagcgtcgtcacccaggttcgcggcagccaacaccgcgtcggcgaagctgtcagtatgttttacgcaccacagcgccgcctccaatgacgccacggcgtaaccggaacccgttatctgcgcacgggtcttgttgcaatactccccctgggcaatcgctacgactttgggcgcagaaagacccgcgcaagagatattcaacaggcgctccttcgttgctccactcaacgcgttaccgatggctctcgccaacaccacgcaacactcgattgcctcttgggctccgtgagtcgtacgggagctttctcgggaaaagtcatcaacgctttgcaggtttggaaagtaaaacagtaccagcggcgcgaggcgcatcatcgaaccgttgcctgcggaaaaaggctctgtcgaacctgcaaacggatcaccttgcgactcaaacgccgtgagcgccgtgcgcacggtcatgcctatatcaaagcaatcaccggtagagctcaggtaaccccacttccaccagttcaggtatcgccccatctggtcagctgcatcaaaaccacctttacgcagcaagctttccgcaaggcacaacgccatcgaggtgtcgtccgtccattggcccgctttcaggttgaacggtcctcctccaaccatgtcggtgaccggtgggaatgtgccgcgaggcatgaattcaacagtggtgcccacggcgtcgccacaggccaagcccaacaggctgccacggtaacgatccaaaagcgtgagagacatttgtcatcctttaaagaaagtgagtcagtcagcactttacttgaccaagcgcttctccttcgaggggcgatagccgaagtacgagctgtagcacttgctgaaatggctcggcgacacaaacccgcaggctaccagcacctccacctgtgacagctcggtgtgctgcaacagccgccgcgcctcggtcacccgcagctccatgtagtaccgctgcggggtggtgcccagttgctccttgaacaagcgctccaactggcgccgcgagcggccggcgtagaccgccagttggtccagctccaaaggttcttcgaggttggcgtccatcagtttcaccacttcacgcaatggcgcactgacgctgacgttttcggtgggtttgatgcggcggtagcgggactcttcgaaggccaggatgtcttcgatgccttcgacaagtgccttgtcatgcagggctttgatccagtccaacgccatgtggaaggcgccggacgggcttgaagcggtgaggcggtcgcggtcgatcacgtagggttcgctggtaacgtgagtggccttggagacttctgccagcgccggacggtgttcagggtgaatggcgcagcgatagccctgcaacaggccggcgcgcccaaggaaccaggcgccgttccacaagcccgcaaggctgatgccctgttcggcggcggtgtgcagcaggtggatgaaggcttcgccggccttgagttcggtacggaatccgccgcagatcaccaacaggtccaggtcgtgcaataccacggcatccaggcgcgcatcggggcgaatcacaaggccaaggtcgctgatgacttcgccctcgtcacagccgaaggtgcgcgaggcgaacagttcggggcgcagcaggttggcggtgacgaaggtgtcgagggtctgggtgaatgccggcagagagaaatgttcgagtaacaggaagccgacgcgggtgaccgacgccggctgttgggtttcgttgaggtagcgcaggttcttgcctttcatgccaccgctgaattgacgtctttccatcgagggttggcccactcttattgttgaggtctttgaaaaaccggccattacgggcgaacactgtagctgtggcgagcgggcttgtcccgcgttgggttgcgaagcgaccctggaagggggaatgcggtgaatcaggcactctgtggctgctggttttggggctgcttcgcagcccaacgcggggcaagcccgctcgccacagcgtatttatcgcctgttgtgcctagagacctggctgccgcaggcgctgatcctgagaaagccacacgcactgcaagcccccggctgaacagcggcaagcgcatctgatacggttttttctttgctatctgcgtctgtatcgaaacgccgtctgggcggacaatgaccccatccccactcccttcccttcggaggccttatgaccaagatggcacttttcctgttcggctttttggtgctgaccatcggcatcggcctgttggccacgatctcgccggtctgacgctcagccggcaaacagcatcgggtacagcgacagcaccagcagcccggccatcgtccagttgaacaggcgcaaccagcgcggctcacgcagcacattgcgcaagccgctgccacaccccacccatacacacactgggcaggttgaccacggcgaacaccagtgcaatcagcagcacattggtgacgtagccttcggccggcgtgtaagtggtgatagcgcccagcgccatgatccaggccttggggttcacccattggaatgccgccgcgccgaggaaagtcatgggcttgccctgctcgtccgcgctgtcggacatgccgcccgctgtcgcgatcttccacgccaggtacagcaagtacgcagcccccacgtagcgcaacaccgtgtatgcccacgggaacaccttgaacacttcgcccagccccagccccaccgaaatcaccagcagcatgaacccgatgctgatccccaatgcatggggcatcgagcggcgaaagccgaagttcaccccggaggcgaggagcatggtgttattgggcccgggcgtgatcgaggacacgaaggcgaacagcacaaaggcggacaacaagctggtagacatgaacatgacgcggcatccaaacggcgggggtgtgcctgcgacagtagagggttatcggctaccctgccccgtacagccagggccggattgaggcatacacttttttgccatggttttcacaaacctttcacagacaagcgcctagggtggcttcagctcctaatgaacatccctttagcccgcgctccccacgcgggcttttctttgccctgggtttatcgcaggcaaaaaaacaggcaagccgtgcttcacggcttgcctgcctggcctatcggttaacgcggtccgccgccagggccagggccgccgccctgaccatgcccgccaccgccgtgaccaccgccaccacccggtggcatgaacatcaagcagccggacaaggtcgataacagcgcgaccaccacagccgccttggttagataactcaacttcatgactacactctcttacttgacgagattgacttctcgctgggtatgacagtgcaaaccgaagtgcgtcacggctatcgtgtaacccgttggtagggtttgtagggccaacggtacaaactgctgttttagttctgcggccgctgcttggtcgaatccagctcggcttttttacccgtggaaatctcagtgatctgcgcagacttggcaatcgcgaaatcgaaggtgtcctgcatttttgcaatcgcgtcggtcgacgtgccgttcagcccaccgttggcggcccaatcgaagttccacacaccggagaggttatcggcacccggcacatcgtgggtttcgatggcggtgaagacgtcaggatgacgctccatgtacttggccgcatcggagacttcggccggcaccttgcccgaggcgttgttggccagttgggtcagttcctgcttggtaatggctgacttgccggtctggcgcatgtagtcggcgatcactttgctggacttggcgatgttcaacttgtcatcgaacaccgacggtgacgctttaggcgtgtttgccccgctgccggcgggcgttacggtggtagacatcggcgctgctcccctgatggtacgaatgaaatcgtcgtgctgacgatagccaggagcagacgttagcatgggcaatgggccattaatctgtgcttcacaacaattcacaaggccagggtctgcggcttctgtgaaagcctgcgaatccattaccatgagccggtattcatgctgattgattgccagccccctacccggaccccagtcatgagagacctaccacccaccgccaccctgcgtgccttcgaagtggcgacccggcacgcgacgttcacatcggcttcagaagagctgcatgtgacccagagcgcggtcagccaccaactcaagcacctcgaagacctgtggggcctgcagttgttccagcgcggcaaggcgttgcggctgactccggccggggccgcactggcgcccattgtgcgcgagtttttcatgaaccttgaggccacgctggctgacctcagggaacaaaaaggccgggttcgcctgaaggtcagcaccacgtattcgttcgccttgaaatggctgctgcccaggttgcccagcctgtcgcagcaacatccgcaaatcctgatcacgctggagaccagcgacaaggccatcaaattctccagcgcagacgcggatgtggccatccgcctgggcaacggcaattaccccggcctgcactcggagttcatgctccgcgagcagatcttcccggtggccagccccgacctgctcaagcgtttcggcgctccccacgagcccgccgagctgctgcgttacccgttgctgacgcgagacggcgcagacctagtgcccaagtgggaagcctggttcgagcatatcggcgtcagcattgcccccctcaaggaaagcgtcaggttcgctgacaccaacatgaccatcgaggcagcgctgctgggccaaggtattgcgctggcgcgaagcggccacgttgaagcggaaatcaacgacggccgcctggtcaggctgtttgagctgccgttcgcgtcaccggtcggctactactttgtgtgccccaaagggatcgaaacccagccgcatatcatcagctttcgtaactggttgttagccgagtcgatgcaggcacagcagaattatcagtgatgcatgaagaatcactcatgaccgaatgaaaagacttcgctgttaaacacgcacttgtggtgtttaccatggcgcatgcctttacccatcgttctactcatcctcttcgccgccctcttgcatgcaagctggaacgcgttgttgcgtgtcggcgccgacaggctgtggtcaatgaccatgatgtgcgtagcagtcgccatcgccagcttcgtaatagccttgtttctcgcccctcccgcgccagccagctggccctacgccgtgctgtcgggcgtgttgcacgtgggctataacctgttcctggtgcgaagctacaaggtgggcgacctggggcagacttacccgattgcccgcggctcctcgcccattctgatcacgctgtgcgcattggtgtttgccggggaaacggtcagcacaaacgcgctgatcggcattgtgctggtatcgggcggcattatttcactggccttcagacagcgcaggctggcggtgcccagcctgccctacgccctgggcacaggttttttcattgcggcctacagcgtcacggacggtattggcgcgaggctgtccggcgcaccgctggcctacaccgtatggatgtgtgcgctctggggcgtattgatgccactggtgtacatcggcctgcgcgatacacgcagcctcttcgcaccacgccccggcgtcatcacggccttgatcggggggcttgtgtccctcctggcctacggcatcgtcatttacgccatgtcccacgcgccgatgggcgccgtttcggccctgcgcgaaaccagcgtgctgtttgcggcattgatcggttattgcttcctgggcgagtcgctgactgcccgcaaagtgttggcgtgcctggtcattgcgatcggcacgatgctgataggttgatctttcacccctcacaggaggttcaagcaatggatacggtctcttcaaccccactgattctgatcaccggcggcagccgcggtgtcggcgcagcaaccgcacggcttgcggcggcgcaaggctacgatgtcgccatcagctacgtcagcaacgaggcggccgcgctcggcgtggtcgcggatgtgcaagcgttggggcgccgcgccctggccatccgcgccgacagtgcagaccctgaacaggtcgcgcagttgttcgctgccattgaccagacgtttggccgtctcgacgtgctggtcaataacgccgcgatcattgccctgcaatcgcgctttgaagacctcgacttcgcccgcatgcagcgcgtcttcgcgatcaacgccatcggcccgatgctgtgcgcgcagcaagcggtgaaacgcatgtcgctacgccacaacggcacgggtggaagcgtgatcaacgtgtcctcggcctccgcccggctgggcagcccgaacgagtatgtcgattacgctgcctccaagggcgccctggagacattcaccatcggcttgtccaaagaggtcgcccgtgaaggcatacgcgtcaactgcgtacggcctgggcatatctacaccgacatgcacgccagcggcggcgagccaggtcgcgtggatcgggtcaaggacagcattcccatgggccgcggtggcgagcccgaagaggtggcgcgcgctatcctgtggctggccggtaaggaagcgtcgttcatcaccgggaccttcctggatgtgacaggcggcaagtaagcggcaaccaccgattatcgggaggccagttggtcccggcgccgggccagcccttccagggtgaaccgcgcctgcatcagcaccacctcccgcaccagttccatctccttctggttcacttcgctccacttcaaggcttccagcagcttgggcttctggatgcggaaggccaggccctgggtaaacagcgccatggaatggatcaccgtgcgctcatcctccagcgccaggccggccacgcgcgcgatcagttcgcggatgacccgcgcaatacgcgccttgaaccgctcctcgaaggccatcgtcgcgctttgcgggcacaacccagcctggtggcgatccatgaacgcacgccatgccgtggtttgcgggctgtcctggatggttgaaaccacggtaccgagaatgcccagcgaggcgtcgatcagcgcgctgtcgccgcaatcggcatcggccaacacgctttccgctgcctccaccggcggcgacatcttgcgccacagcagcgtgatcaagtgctcgacgcacgccaggtacacgccttccttgccatcgaagtagtactggatcgcaggtgcgttgacgcccgcggccgtggcgatatcgcgggtcgacgcgccattgtagccccgtgcgccaaacacctcgacggcggcctcgatgatgcgtgcgcgggtttcttcgccgcgctggtaaccaccctcggcggcaggtttgtgtcgtgccatgtgcagctcccttcgaataccggaccaaaatataccagttgacaaaaattcgcgaaaaaacgaatttattccacccgttataaatctggagtgacctcgatgtcggctgcacctccctcccctcaggtcatgcctgaagaaactgtcaacggtcaacgcggcaaggcccggcgcatcctgctcagcgtggccggcgttgccttgttggcgggcgtgtcgtggggcgcctggtggtggatcaccgggcggtttatcgagaccaccgacgacgcctacctgcaagccgacagcatcagcgtggcgccaaagatcaacggctacgtggccgacgtgctggtgagcgacaaccagaacgtcaagcgtggcgacgtgctggtgcgcctggatgcgcgcaagtaccaggccgtgagcgatgaagcctcggcgaccatcgccgcacgcaatgccgacttcgccaaggcccaggccgacctggtgcaacaggactcgaccatcgccgaagcccgcgcccaattgcagggcgccgaggccgatgcccggcatgcgcagaccgaagtcgcccgctacgcgccgctggcccgctcgggcgccgaaccggaagagcgcctggcccaactgaacaaccaactggcacaggcccgcagcaccgtggcggccaaacaggcggcgctgcggtccagccagactcgctacggcacgttgcaggcccagctcaagcaggcccaggcgcaactgggcgtagccagggccagcgaggcgcaaagccaactggacgtcgacgacgcggtcatccgcagcccgctggacggccgtgtggctgaccgtggcgtacgcgtggggcagtacgtgcaacctggtacgcgtttgctgaccgtggtgccgatcagcgcgatctacctcaccgccaactacaaggaaacccagatcggtggcatgcgccccggccagaccgtcaccgtgcatgtcgacgccctacccggccgcgacctgcaaggccacatcgacagcctggcgcccggcaccggcgcgcagttcgccctgctgccgccgtcgaatgccaccggtaacttcaccaagatcgtgcaacgggtaccggtgcgcattgccctggacataccggatgacctgcgtgccgcattgatgccaggcctgtcggccaccgtggaagtcgacacccgcacccacgccgcagacgccaaccatggctgaggcgagcatggccggggtggctgccgagaaaccgcgcaacgcctcgctgaccgactggatcgccgtcgccgccggcgcgctgggtgccctgctggcgaccctggatgtgtcgatcaccaactcggcgttgccgcagatccagggccagatcggcgccaccggtaccgaaggcacctggattgccaccggctacctgatgtcggaaattgtcatgatccccctcgcggcctggctgacccgagtcttcggcctgcgccgcttcctgatcggcaccgcactcaccttcacgctgttctcgatgttctgcggcctgtccaccagccttggcgcgatgatcgccgggcgcattggccagggcttcgccggcggtgcgatgattccgaccgcgcagaccatcgtgcgcacgcgcctgccgccccaccaactggccatcggcaccacgatgttcggcatgaccgtgatcctcggtcccttgctcggcccggtgatcggcggctggctgacggagaacatcaactggcgctggtgcttctttctcaacctgcccatcagcatcgcgctgatcaccttgctgatcaccggcctgcccagcgaacgcatgaacctgcagcgctttatcagcgccgactggctgggcattctcggactggcgatgggcttgagctcgctgaccgtggtgctggaagaaggccagcgcgaacactggttcgactcgctgctgatcgtgtggctgagcattgccacggtcaccgggtttttcctgattgccgtggggcaattgcgctccagtacaccgatcctgcgcctgccgttggtgctcaacaaaagctttggcagcgtgttgctgatcggtacggcggtgggcgcagggctgtatggcacggcctatctggtgccgcaatttctcgggattttgtccggctataacgcgcagcagtccggcgcgatcatgctgctgtcggggattccggcgtttttgctgatgccgatcctgccgcggatgctcggccgctacgacctgcgctggatggtcggcgcaggcctgctgctgtactgggccagttgttttgtggacaccctgttgaccgccgacagcgtcggccatgattttgtctggtcgcagttgctacgtggcttcgggcagatcctggtgatgatgcccctcagccaactgtccatgcgttcggtcgagaccaaggacgccggcgatgcggccgggctctacaacatgtcacgcaacctcggcggcaccatcggcctggcgctgctcggcgtgttgatggaccggcgcagccacttccatgacgaccggctgcgcgaagggatcctggccaacagccaattgacccaggatcacatggccagcaacaccgccagctacctggcacagaccggcgacgcctccaccgcctcgttgcaagccatggcccaactggccaatgacatcgcccgccaagcctcggtgatggcctacaacgactcgttctacgtattgggactcgcaatgctggcgtgcctgcccctgatcttcatccttaaaaagcgcacggtacagccatgattgctcgctcgtttcctctgctcctgaccgttggcctgctatcggcctgcaccgtgggcccggactactcgggcgcccccgatgccgcgccgaaaaccctggccgccgggcacctgccccacgccgaccacaaagcgcccagcgcaccggccgtggcgcagtggtggcgaacgttgaatgacccgcaactcaatgaactggtcgacctggcgctgaacaacagccccgatatcgccaccgcccaggcccgcctgaaacagtcgcgcgccagcctcagcggtgcacgggccgacgccctgcccaaggtcaccggcgacgccgcgatgctcaaactgcgctcgcccgacacctccgcactgggtggcggcggtggcggtcgcgggccattgacgctctacctggccggcttcgatgccagttgggaggccgacctgttcggcggcacgcgccgtgcggtcgaggccgcgcaagccgaagccgacgctgcccaggcgcaactggctgacgcccaggtgcaactcgccgccgaagtggtgcaggcctacaccgacctgcgcgaccaacaggcacgcctggccctggtcgacgccagtgtcgacatcgaaaaccaggccctcgacctgacccagcaacgtcgcagccgtggtgtggcctcacagctgcaactggaacaagtcctcacccaggcagaaaacacccaggcccaacgcctgccgttgcaagccgccatcgttgaatccctggaccaactcggcctgctttgcggccaggaacccggtgaactggacggccgtctcgccaccgccaaagccctgcccgccatccccggcgtggtgcccgtggcagaccccgccgccctgctcaaggcccgccccgacatccgtgtcgccgaacgcaaactggcctccagcaacgcacagatcggcgagaaaaccgccgactggtttcccaagcttagcctgatgggcgacctgtcgttctccgccggcgaccccggccacctcgcccgcaaagacaacggcacctggctgatcctgccgcgcttgacctggaacgccctggacttcggccgcgtggccgccagtgtcaaaggcgccgaagccggtcgcgacgaagcgctcgcacagtacaaaagtgtcgtactgagcgcgctgcgcgacgccgatgtggccctggcgcggtacggccatcaacgccagaacgtcgtgctgttgcgcagtgtggaatcctcggcagtgcgtgcggcagacctgacccgccaacgctaccgtgccggcaccgccagcaccctggactggctggatgcggagcgcacccgctaccaggctcaggagagccggatttccggcgacgcggagttactcaaggattttgcttcgttgcacaaggcattggggctgggctggaccttatgacacactgcctcgccaagcgccgcctgacacgaggacagcatgctccgtattcatccagcaacccacgccgaccttgaagccctgcgcgacgtcggctgcaccacctaccgagaacacttcgcgcacatctggtcgcctgccggcttgcaggccttcctcgaccgcgacttctcccctgcctcgttgaaccaatcactcgaatcatccgacagccaaacgtggctgctcgcgtcggacgaaagcgagcggcccgtaggccttgccaagatcaactggtcagcccctgccccggtcacgggtgaagtgggcgcagaactgcgcaagatctactttctcaaatcggcggctgggcgtgggtatgggaaacgactggtgcaatacatctgtgaacaggccgtggaacgtggagacagcttgctgtggctgacggtactcacgtccaatccggatgcgcggcggttttatcaggcgtttggcttccaggtgatggggcaaattccattcaagactgacttggcagagattgggatggatgtcatggggtttgacctgaaacggttggggcaataaatggaagaattgatacgagggctcgacgggcccaggacggcccagcaggagttgttctacgacctggaagatgcggcggcagtgattggctggtcggtggttgagttgaccgctttggccgccagcggtcggacgccggatgaggtggcggcgctgatgaaaatctgcgcgttgctggcggcgcagcaggagaagatccgcgcgtatgcgggtgaggttaaggatcagcggattgtcagggctgacgtccggtaaatacgcatgttcgcgggttcaaaaagggatttacggatgccgttttcattggaagaaagaaccgcgttactcgcactcaaaggcgtgggaccaactgttattgctcgattggagcagatggggattacgtcgatggcggtgcttggcaaagcggatgccagtgacatcctgacgcaagaatcggcagcgttacagtcgacctgttggaagaatagtccgcaggcgcggaaggcgattacggcggccatggagcttgctaaaaagggcctatagaagttccttttgcaagtgtcccttcacactaactagcgcgcatcactaactacgcagggcagtgattattgaaatccttgacgcaataaaagttttcacctcagcaacatcttcaaactcagtcaccgcgagactcaacgacaagcgagttatttccagagcactacgttcgctttcgcccatccgcttagaaagttctccaaggtcttccatagactttttattttcaggcgtatcttttatatctttcaaaggaccaagcatagaaagtgcagtattgattcgttcacgataggcgttagcggcgctatgctgataattactttgttgatccaacatttgcagaagcccacttttataatcggcgactctagagcttttcaaagcgctatcggacaactcggtttgtcgttgctgctctataaatgccaggcgttgctgatccagtaaactactatactcttcacgctgagcatccatcatttcccgctgcaagctgatagttttcagaatagcaaccaacgtaacaacggaaaccatcgggccaaacacgccaccgaagaaagagccaaacgctgaccaattgttgggctcattagataggccatacctaaatacccacaaataagacgtcacagataagagtaatgcgataactaagatgctgattccataccgcaacacagcgtcgatacgcacaattcggcgtgcatttaactcatccaatgagacattcgacttttcaatcatcaaaggtcagctccctattttagaaacttcagaaatcacgttttcaaaggctcgtaagcccgagcaaaaaatgttattggcatatcttataattgttgcaaccgacggcgtattctaccccgacgcaagcctgttttcctcaactgctgctaactcagcattttctacacccaataaaaaccccgtagacgctaatctacggggttttcaagagtggaggccgaggccggaatcgaaccggcgtaggcggatttgcaatccacacaaatcatcatatttatcaaaaatatacgactctatcaattccgcacctccgagatttagggtggtcagagcccaaggaaatcgggggcacgatttcgattgcggaatggatttcctacgcttcgtcggcttcggtcgcaccggatgccatttcatactactgtgcatagatacagtatttagattaaccaaaccatgcacctcgatgaagaaacctgcgaatggctcggactgcccacgattatttaagctcaaccggacttaagggtctggcctgcacccattggcacgagggctagaaacggccctagaatggttggccgcgcctggccacagcgcgcgcttcaagactcccgagtggctcaaagtcaacgcgagtattggtaacgtgcgaaactaagccaccccatttgtccaacaaccgggctacactgcataaactttgataccacccccatcatcacactccctcacgcataggttaccaatgagcgtaaaagcatttgccactcagcttatgaattcaattaaagatatcaaaaacaatagtgaatcggtacagtgcgacagcttaattgcataccttgaaaaagtaatagctgatccaaacagcgaaccgacacccagccaaattgaatattataagtaccaacttcaattaatggttgagggagagaaaggcagtcacgcttcctatcttgaggagttccgcgcagtgattcagtcaggacaaaacgccatgaaaaccgcgcttttgatgaacggcggagcatcgattgccctacttgccttcattggaaaactcaccgagaagcagcagtatcaaatccctcacttcgcggaagctcttgcaatttttgttctaggcgttttcttcataggtgcagcttcaggtacgacttacttaagtcaatggttttatgcagagcccgaaaaatggaaaatacgcattggaagtgccttcaacactatatccatattgctcggcctaacctctttggggttttttgtttggggaatgtgcaaagcttattctgcgttcctagcattcacttaattacctactacttgcgttgactcctctcaaatatgcttggcaggcccgaagcgcgatcaatccttggtcgccggcgtcggtgatggcgacaattctttgagcgtgcgccggatccctcagggtctgaccccactttcttcaacagccattgctagggccaattgtttcgctgccaaagtagacataaccacctcaaacgtgacagacaatgaaaaatacacaatatttttttgtttttttaacgttattttacgcttgaagaaatacaaaaaattttgtaacctccaagaatgacagccccccctgcaccaagtcgcctcgctttagttttcaaaaagcgccgcgaagaattgaatatgactcaagaggatgccgcgcgccgggtgacagaacgccttgcacctcaaaaaaaataacgcaacaaacatatgcatcgtatgaaaagggtaaatcacagtcatcgaagcactccaccatcatcgcagacgtactggacctcccaattgctgtagtactagaagcaaacttaccgaacgggttcaagccgattgaatcagcgtctagatccaatgcatctctaattgcgccacacctcttggtgtgggacgagaaacctccactttacgacgaagtcgaggttccctttttcaaggaaatagaactgccaagtgattccggacggagcgaaatacaagagtgcggttcagtaaagctacgaatcagccaggctactctctcgagcatgaatatcagcgcagaaaagataatctgtgcgcaagtatctggagcgagcatggagccagtcttacctaacggtagtaccgtaggtattgataagagccgaagaactttgaaagatggcgacatgtttgcactaagtcataataatcaactccgcgtgcgaatcttatatcgcttaccgctcggaggcctgcggatgcgtagctttaacagagatgaatatcccgacgaagaatactcagcagaaagagttatatcagaggacatagtaattacaggtagagtattttggtattccgttctaaggtgatattttcatcaagcaccccgctgcagcactaggaattcgcatgctttattcgtaaaaaaagaccgatctaaataacatccctccaactctttgacagatttaattatggatcatgtaaaggattacctcgcgaaatacccgctatacgaatcactcagccaacggctgaaaatcttactgaaagacattgcggatgcggacaatatagacctgcatgcgatcgaagcaagagcaaaaacaccagatagctttgcatccaaaattactagacccggaaaagattattccgaccccctgtcagaaatcactgacctttgcggcattagagcaattctctattatcaagaaaatgttgaccaactcgctgacgccataaaaaaacactttaacgttagcacaacagactcagtggataaaagaagcgagttaaaccaagatcagttcggctatatctcactgcatctaatttgcgagataaataacgcccgcgcaatgcttcccgagtggaaaatatacgaagggctaaaatttgaaatccagataagaactgtacttcagcatgcctgggcatctatctctcaccagttacattacaaatcaaacgcggatgacaaggataacttcactagacagctctcgagaattgccgggcttcttgagctgtcagatgaacaattctcggaactcaaaaagaaaagagccactattaaaaccagcgtcaaacaaagtattgccaaaaaagatttagacctatcaatcaacagcgtctcgattgaacagtttctttcttcatctaaagtcttacgcgagattggggtcgcggttagaaaagcaaaatttaaacttactgaaagacagctagatcccgctcatatgttttcattctgccaaggcttacagattacaaccttacaggagctgaactcactactggaaaaattcgctcctagagcaattgagtttttcaatgagttcgcagaactaagcgacccgacatcgacattaggtggttatgggcattggggagctgtcgcaatagtaagcatccttcgcaacgaaaaagatttgacattcatcctggatgaggaaatctggagtgcggattacctcgaaaaggttaaatctacagccgacaagatatccttataacagccaacattatgagtcagtccggggtttcggccccgatggctcatacatagccgaaccaagccaacctcagatctacgatattttattgtatgcagtcgcaattttttgcattaacaaaatataccgtttaccacttaacaaatttacacgtatcgtctttatcgttatctctcaccgaagattacgagccatgcaaacgacacagcacagcaaaacccgccgctcggtctaccttcaacccgcggccgcaaccagccccgccgccgtagaacgcatccagcacagcaccggccttctgcccatcgtcaatcttgggcgcgcgaccattgcccccgcccccgcagcggttgcccgcgatgaccagggcccatgtggcgcgcccgctcaaggctgtgatgcctgaatagaagtacgtcgaacatcagatcgcgctgctgtcgcacatgttcacgatcgcacgctagtggggcctgacaaacaactccaccccttgcttcggtgtgcgccgcaacaaagagaccccacgggattattacgccgcgatatcgtgtggaatgaggtgtacgatgcagccgtacaggaactcaaagacgctatggacctggcttatctgaccggtcaacgacctgccgacgtactcaaagtggccaccactgatttgaacgccggattcttaacggtcaagcaaggaaagacagcgaagaaactgcgcctacgcctagaggatgacagtgtgctgtctgccctgagtgcctttatcaatgacctacaggcgcgtcgagcgcacaacggcattaaaacatcgacgctgatcaccaacaagtccggacttcgcatgagccagcagaagctacgcaatcgctgggacgaagcacgcgaaaaagcagccatcaaagccggcgccgacggcgactctgcgctggcagtactgatccgccaattccagttcaaggacattcggccgaaagctgcaaacgagatagaactgacgcacgccagccgcttgcttggccatacaacagaggagatgacaaaaaaggtctatcgaagagtgggagaaatagtaaaacccactaaatgagaggctctaggtcctcaacatactgctcaacgttccttctagacaagatcaaaaacttgtgaacatcgctgatagaaccttcgaagtgaaattccacccagtcgtactctttcattacatcaattgcactatttatcttctcacgcaattcatgagcaggcatcgaattagataaagatacagggagagcactaatcaacgccccatctatagttccgctcagattaatatcgctactatctcgaatcgtaatcagaccaccaccaatattaatggtattagacggagaattttttctgacctgtggtttcagacggttatgtttattgaaatttgtgtgagagcaaagatcagaaacccagctatctccacaattgtgaggctgaatagattcaaccaccgcgagcaggtctggtctttgttgcgccaagcccggaagattttttgagaggctttttacgaaactctcctcatcttttccataaggaaaatatggtgtgtttttcttttttgtataactctcccaaatatcctgtgctgtatattcaagcacgctccgcaagtgctccatcgtagacttaactaatggtttcaacacctctaactgaagatcatccgatcgagcgaaatcatatttcctctcaattgctaaaatattcgcactgcactcttctaaaagtgcttgtatgtctgcgcgccttttcatcagtcttttccttcattttatccgagagggtctgtaacgcgaatgtatcacttgaaccgataaacgaacaacgcagcacctgtcctgcaccgctgggggacaaacggaatttttggcaaaactccaggcaggttgcggaaggggtgagaaaagttgcggaacggatactaaatcgcaggcaataaaaaaccccgtagatcattgatctacggggccttaagagtggaggccgaggtcggaatcgaaccggcgtaggcggatttgcaatccgctgcataaccattttgctactcggcctcaaacgatcaatgtcctgactgctgacactcaccgcataaaaacttgagtgggctgtataaccctgcctctactctaactcattgaatacattgaagtttttaatgcttcgttgcgttcgatgggcgccattatgtacgtatttgcctaggcgtgcaaccccttgatttcaaaaatatttcgtattggcatcaaggggttgcgggcctgccctactccttgatgcgcagctgttggtactgcgggtcggccttgatctgggcgtcggtgaagggcagcgggcgcagttgtttttgggagaaggcttgggtctggtccttggcgtgtggggaagccgggttggtcgactcggagaacgcgagaatgccttgggcatggggcccctggtcgtcgaaggtgacgatttgcaggtagctggtgccgctgaccacttcgcgcttgccgtcggcgcgcggcacggtttgcatggcgttgtagatgccgagttcctgtgggccgccgtggatcggggtttgcccggagacttggatgtcgccccaggtgctgttggcggtcaggcccaattttgcgacgtcggcggtggaggccagcatggcttcgcgcagggctttggcgacgtcggcgcggtcgatcgccaggccacgtggcgtggtgaggggctgggccgggtcgaaggccacgcgccaggcgtcggggatttgctgcaggtgctgcaccaggttgatgaagtgcaccaggccgagaccgctgtcgaggttggcgcgctggtcccaggttttcaggctggtgcacaggggttgcaaggcagtggcgtcggtgccgaggtgtttggcgcagaactggagcaggtcaggcatgacttggccggccaggtacacctggttgtccatcaccatgtcgtgcaggtcgctgacgctgatcggtttagccagcgattgcagacgttgcaaggcgaaacgcgcacgcgggccgaggccgatgtggtcctggctgatcaccggggagaacccgctgagtggcgcctgggggttagccagccatgccgagtcgttggagtgctgcacgtagtctgtgcgttgcagttgcggcagttgctcggccgggaagatgccggcctgggcagcgcgcgggtcaacgtcccaggcgcaggcgctgtgggcgccgtcgagcatgatcatctgcaggccggcgcgtggatcgctgcattgtgccagcttggccgcgctgacattgggcaccaccgacaggttcatgtacaggctctggccctggtcatcggcggccagggtgttgacccacgggatgccttgcagggtgtgcaccgaggttttcaattggtcgaggctgccggcacggttcatcgcgtaccactgttgcagcacacggtcgttgcctaggttggcgtcgcgcaggctgaaggcgtagtggctgtcccaatcgagcttgcccggccactgcactaccgggccgaattgcgagctatagaccgtgtgcgattggtccttgaggctgccgtcggcttgtttgacctgcaccgtcaccgtggttttatccagggcgaccgatttgccgtcgagcaggtagcgcgtcgagtccttggggtcgagggtcaggcggtacagggtgaagtgcttggacgtgtccaccgtgtgggtccaggccacatgctggttaaaaccgatattgatcaccggcaggcccggcagcgcagcgcccatcacatccagctggccggggatggtcaggtgcatctcgtaaaaccgcatgccgcccacccaggggaagtgcgggttggccagcaacatgccgcgcccgttgaacgagcggtcacggcctactgccacggcgttactgccgcgatcaaaagcgaagcgctgttggttcgcggcagccatttcaaaagccttggcagtgctcgcaacgttggccgttgcttgaggcggcatcgcacccaccagggcttcggcgaattggccgacaccaccttcgaccaatagcctgcgggtcagcttgacaaggtcttcagccaccagcggccgtacccacgccgcctgacactgtgcaggcgcgccctgctctttcagataacggttgtagccggccacataaccttcaatacgctgctggatctgcgggctctgcgccctccagaacgcagcgaccgcgtccggcgtattgagccagccaaagaacaggtcactggccaggttgttgcgctcctccagggtcgcctgttcggggccaaagaagcgggcgcgctgaccatttacggtgaccacttcattggccagcaggcacaggttgtcctgggcgtaggcgtagccaatgccgaagcccaggccccgctcatcgttggcgcggatatgcggcacgccgtaactggtgcgccggatctccgccgatgcttgcgtcacctgctcccgcgcagcggcagccaggctcacgcccagcaacaccccggccacacacaccctggacaacccattggaaataatcacgcagactccaccgtcagatttaaccgcctcacaaggggcaataagcccaccgtaagaacgcaaaccaccaggaataatttagcgcgcagggtcgtttatttaaggcgatgcgcaggtgacaaaaccgatactgacgaaatttctacatccgacacttcatgattttgctcgctcgttcgtcttatcaactaagagcactcattttttcctgatcaggctctgataaggagtttttgcatgtacaacccgcaagtgcccacggatggacattcacaaatggccgaggccagtttcggcagcggcccgcaagcgttcggcaaagcgcccgaacagcacggcaaccagcgcatccgccatctgctcaagtgttttggcttgcgtaccagcctgatccggctgaaggtcatcgacgccctgctcaccgctgccgacaaccaacgcaccctcggcgtgcgcggcgtgcacagccatttgctggagctgggcattccgttgtcgtttctcagcgtgcgcgaagtgctcaagcgcctgtgcagcgagggcgtgatcaccctcaatgcggacaaaagctacagcctccatgaagaggctgccaaggtactcgaaggccgcgcctgatcgcctttagagcttgaccttgcggcgcatgatgccgttgatcaccaccacgaccactgcgacggcaatggcgatggtctggaatgtcttctcactgatgacgccggtgttctgcaagtaggacaggccaaacatcgtcgccaatacggtcagggcaatcagaatcgaatatttcaaacgctgcttttgggtcatgacgggttcctgaacctgaaaaatgtagccactgtgaatcgccggacctgccttacgcacgatggcgagcaggtccgacaggcgctcatgttacaggcgcgggaatactttggctcggtcaatcagccagcatgcacccagcgctggtgcagccaccgcgcaaacgcatcgagcgcaaaccccagcaaaccgatcagcaccaccatcgccatcagctccgaataagccagccgatcacgggtatcgaggatgtaatacccgagccccgcactgacccccagcatctcgcacggcaccagcacgatccacaaaatgccgatggccaagcgcacgcctgtcagcacatgccctaccacgccgggaatgatcacccggcgcaaggtctcccagcgggtcgcactcaaactggcactcaattgcaaccagcgtgggtcgagctgacgcacaccggcagcggtattgagcatgatcggccacacagcggcaaaggccagcaggaaataaatcggctggtcgcccacgcccatcagcatcaccacgataggcatccacgacagcggcgagatcatgcgcagaaactggaacgccggcgtggtcgctgcctccagcttgcgcgagctacccactagcagccccaacggcacgcccaccagcaaggccaggaacagtccgacgaagatgcgcttgaggctcagggcgacatgcagatacagctccccgcgcccgagcaattcccacaggctggcggcggtggcggacagggaaaagcgtgccgacaagccgtccgccgcgccaaacactttcacccccaaccaccagagcaacagcaaccccgccaagccactcaacccgagcaaccagcccgggatttcacgcgtgttcaaacgccgatctcctcatgccgctcaaagccatcaggcaaaccaaaggtcttcataccgcccacggactcgatggcgttgcgcacgaagcggtcgtccaccaggtccttggcgacaaatgccgggtccaggtcggcgaggaatttcttgtcgccctcgatcaacgtgtccttcaggcgacgcaccagctcctcggtgtagctggggaatgggtagggttggaagtcgatgcggtgctcatcccaattggcgtgctggatcgcgccgtccgccaggtaggccgcacggtcggcggcggccggtgccagcactttgctcaacaccggctcggcgtgtggggtgtagcggttcggaccgtccttggacagcagcttcactgcctcttcgcggttgtcgcgggtccagacctgagccttgacgatggcattcaccaccttctgcgaccactccgggcggttggtcaggtcgttctcgtgcatgaacaccacgcagcacgcatggttgcgccacacgtcgccggtgaagcgctgcacgcgaccgaccttgaggttttccgccagggcgttgaacggctcggcgacgatgtagccatcgatgcgctggctggccagggccggtggcatgtccgacggtggcaacacgatcaggttgacctcattggccgcaatcgcactgcccgccgcccgcgccaccggcgtgaggccgttgtcacggaacagctgctgcaccaccacgttatggatcgaataccagaacggaatcgccaccgacttgccgcccagttgcttcacgtcagtgatgcccggcgccacggtcaagcccgagccgcccacatggttccacgccaccactttggccggcaccttgctgccatagcgtgcccatacggtcatcggtgacaacaagtgaatcacgttgacctggcccgagatgaacgcctcgatcacctgcgcccaactgcgcagcagcaccgggcgctcggccttgatgccttcggcttcgaacaggccattgttatgcgccaccagcaacggcgtggcgtcggtgatcggcaggtaaccgatgcgtacgggggcgtccggctcgctggcggcgcgggcctgcagactgctcagcagcggcaaggctccggcggcactgagcacggcggagagtttgagaaagtcgcgacgcgagtgggtcaggtcatccaggcacatgggcaggctccagcaggtcaagtgagttgggttgggggcggctcgcctgccgtagggttttaaggatatcgatgcgcagcgcgccgatggcttccacctgttcttcgcgcggttgcggcaggtcgatcagccactcgcccaacgtccgcgccgggcggttgcccagtagcaggatgcggtccgacaacagcagcgcctcgtcaatgtcatgggtaatcagcacggccgccgagccttgctcgcggttgactttgagcagcaggtgctgcatgtcggcgcgggtcacctcgtcgagggcgccgaagggctcgtccagcaacagcacctggggctggcgcgccaggcaacgggccagtgccgtacgctgggccatgccgccggagagctgcgccgggaagtgctggcgcgcatgctccaggccgacggcggcgatggcgtggtcgacacgctggcggcgttgctcaacgctcaagtggggttgacgagcgaagtccaagccgaaggcgacgttcttttccaggctcagccagggcaacaggctggggtcctggaaggccaccgccacgcgcggatgaggcccatccacgggttctccgagcacccgcacactgccgccctgcggcgcctgcaaaccggcgagcacccgcaacaggctggacttgcccaccccgctggggccaaggatcgacaccacttcaccgggctgcagttgcaggtcaaagccctgcaacaccggcccgccggcataccccaggcaaatcccccgggcgttcaatacggcgttcgtcataggttggcctggcgctgcaactcggtgcgcaactgcaccaggctcggggtcacgatgggcacaaacgcggactcacgccagcgccgcgcaaaaccactgccgtgggcggtgaggtaggccttgccgccgctggcctgcaactccagttgcacggcgctggcagccgtttcggccagggcgatgcgcagcttgaacaacggcaccggttcggccgcaaagcgtccggccaacaggccgttcttcagctcggtgaccaggtgatccagcgtcacgcgtagcgtttccagttcttcgcgcaacaccgtacgggtcgcgcccagatggttggccacttccgccagggaacgccgggccaggccgatggacatgccgcactgcaaccccaggaacgccgggcgcaccgccggcaaaaacttgcgtgcatcttcatgcagcaaccagtcgcgactcaactccacgccttcgagccccagggccgcggtattgctggactgcaaacccaatagttccaggtcgcgggagcgctgcaggccggccaccgagtccggaatcgccaggataaacggcgcaccacccccgacctgctcgatggcagccgcagcgacaaaaccgcttttgcgcaggttggtcacccaatgcagccggccgttcagggtccagccgtcgtcagtgggttcggcgctgatctgcaaggcctcgataccggacaagaacttcatcgcgttggacaaccccgtggcccccgccaatttgccgctgagcaggtccggcaacagtcgctcacgtagccgcgcattcgggctttgcagcaaatattcgatgaacgaacgctggccccagcacacaaacgccgccgccagggaatggctggcaacattggcgatggcctccaccgcacccgccacatccccgcccaggccaccgagttgagccggtacgccgatacgcaatacattggcctctgccagccgtggcagcacttcctgtggatcgcaactgcccacgtccagggcctgcgcttgaacatcgagccaacggctcaagattgggtcaagcattcatgtttctccttttcacagcgggtgagccatcttcagcttgcgggtttttcccagcggtattgcgccagctccgggttcaacggggtgcgcgcaaacacgttagcgaagttgcacagggttgccaggctcacgcccaaaataacttccagtgcctggccctgggtataaccggcggccaggaacgcgtcaaaaccggcatcgctgacatcgccacgggtagcgatcacttcgcgggtaaacgcggcgagtgtttcgtagcgggcattgggcagttggccacgttggcgcagggcgtcgatgacttcttccggcaatttggctttgttgcgtgccacggcagtatggccggccacacagaaatcgcagccgtgggtggtggccgcaatcaactgcaccacttcgcgatcggccaggctgagttcggccttggcattcagcccggacacggtgatgtaggtctccagcgccgccggggcgttggccagtactgccagcaggttggggatgaagcccgagcctttcaacgcattttccaggaagggcttggccgcttccggcgcggtttcaggggtgagcaagggtacacgggacatggaggggtctcctgatgggttcgtgtaaccagtctgttggttataaaaaatcgtctcaataggctaaagtagcgattacttgctcttgagtctttccattagatgaattcgtccagtgcacttgtcgattggttattagacagcctcgaactcgacaccagcctgttccatgtgggccgctattgcggcgactggcatgccagcacccatggcctggcaagcgcgagtttccacctgattgtgcagggccagtgctggctgcatatcgagggcgacaccacgccgcatcggttggataacggcgacgcggtgttcctgttgcgcgacctggagtatcgcctgtccggtgagcccacggctgccggcgcccacgaatgcccccgtgtaccgatggagcccctggacagcgccgcccacgacggcgtcggcctggtctgcgggttcttccactttcagtccggcttgtcggcgatgatcgtcgacagcctgcccgcctggatcatcctgcgcgcaggcgacccttcgctgacggccgcgcgcaacctgttcgaactgatcctgcacgagtgcgagcgcgtgccggcgccctcttcggccctgcttgaacggctgtgccacctgctgttcctgtatgtcctgcgccagcaggtgctggacaaccgtgaactcggcggcctcgcggcgctggcccggcaaccggcgttcaccaacctgctggagcagttgatcgcccaccccgccgacacctggaccctggagagcatggccgcctgtaccgggctgtcgcgctcggcgtttttcaaacgtttcaatgaactgtgcggacagtcgccgggccaagtgctgctgatgatgcgcatgcgccatgcctgccagctgttcaagcaggaccagaccgtggcggatgtgtcgctggccgtggggtatcagtcggtggcggcgtttacccgggcgtttcacaaggtcaccgggcagcagcctggggcgtatcgcaaggcccaggcctagcgctgcaaaccagtgccgggccgggcgcaaagctcgatcagccagtctacaaatacgcgtactcgctgggacagttggcggtgtggcggatacagcgccgacagggccattttcggcaccgccaggctgggcaatacctgcaccagggtaccttctgccagttgacgcgtcgcgtggtaagccggcgcctgaatcaagccgaacccggcttcacaggcagcgaagtagccatcggaactgttcaccgccaagccttttgacaggttgaacgtgcgcaattggccgtcgacttcaaactccaggccaaagcgtttgcccgtgacgctggagacgtactcgaccatctgatggttggccaggtcctccaacgatgccggaataccccggcgcgccagatataccgggctcgccaaggtcagttgatccatcatcgccagaggccgtgccaccagcgattcatccagggccaaaccaccgcgcagcacgcaatccacgccttcacggatcaagtccaccgggcggtcgttcagactgatctccagttcgatgtgggggtagcgggccgtgaatgtcggcaatgcagggatcacgatcaagcgcccgatgcccgacggcatgtccacactcaaggtgccgcgcgggttctggcgttgcgtggaaaacaccgcctcggtttcctcaaggtccgacagtaattgcacacagcgctggtaatacgctgcgccatccagcgtcgggctgacttgccgcgtggtgcgctgcaacaattgcacgcccaggtgtgcctctaattgcttgatcaacaccgtgaccgaggcgcggggcagttgcaggctgtcggcggccttggcaaagccacgcagttcgacgatccgggtgaacacgcgcatcgcgttgaaacggtccaaggggcggttccttgcgctgattatttagatattacgaatagtgttagtgcttttagccggtttatcgcagttttgtcgagcgtgacaatgcaggccttcccacccaaggagcaacacccatgcatacccgccaactcggtacacacggcccactcgtctcagccatcggcctcggctgcatgggcatgagcgatttctacacccccggcagcgacacccgcgaagccatcgccaccctgcaccgcgcactggagctgggcatcaacttcctcgacaccgccgatatctatggcccgcacaccaacgaaacactgatcggcaaggccatcgtcggcaagcgcgaccaggtgttcctggccagcaagttcggcatcgtgcgtgacccggccaaccctgccttgcggggtgtgaacggccgccctgaatacatccgcaacgccatcgacggcaccctgcgccgcctgggtgtggagaccctcgacctgtactaccagcaccgtatcgacccggacgtcgccatcgaggaaaccgtcggcgccatggccgaactggtgcaccagggcaaggtgcgttacctgggcctgagcgaagcctccgccgccaccctggaacgtgcccacaaggtgcacccgatcagcgccctgcaaagcgaatactcgctgtggagccgcgaccaggaacataacggctgcctcgccacctgccagcgcctgggcatcgcctttgtgccctacagcccgctgggccgtggctttctcactggcgcgctgcaaagcccggacgacttcggcgccgatgactaccgccgcttcagcccacgcttccagggcgagaacttcgccaagaacctcgaactggtcaaacaggtgcaggcgctggccgccgacaaaggcatcagcgccgggcaattggccttggcgtgggtgctggcgcagggtgatttcatcattccgattcccggcaccaagcggcgtaaatacctggaagagaatgccgccgcgctgtcggtcagcctcagctcgagcgaactggcggccctggaggctatcttccccgccgaggcgcccgctggcttgcgctaccccgaggcggtgatggccatgctggatatctgaatcgaaaccgcgccgctcaccggcgcggttttttcttgcacgatagtacctaaagctccgccctgccaggccgatagccctacgaagctctaacaaagccgcgtcgataataaacgcttcgtaaggacgaccccatgcccccactgcgctccatccaagcccgctataccctgttcctggtgctgttcgtcctggtgttattggtgttgaccgtagtgggtatcggccagttggtcgcgcccaaactgcagcacaccgaagaacaggtggtgctcaaccgtatcgccgaggtcgccgagcagatccagggcgaactcaacaaggtccagtcccagcaacgcagcatcacccagaccgttccattgctcgacagcgatgccatcgacaaggtcctgccgggcctggtcgaccagtatggcgagctgaaagtcttcggcggcggtatctggccgctgcccaaccagcgcactccggggcgcaacaagcacagtacgttctggcaccgcgatgcgtcaggcaagctggccgtgaacaccttctggaacagcgacccggcgcccaactattacgaccagagctggtacaagggcggcctcgcctcgcctcgtggtcaatgtgcctgggccgccgcctacaaggacgacgccagccaggagccgcgcaccaactgcgccatggcgatccagcgcgacggcgtgccctacggtgttgcaaccatcgacgtgaccctgggcttcttcaatgacttggtcgccagcaaagagaaagacatcggcgggcaaatgctgatcgtcgaaggcgacggcaagatcatcagcaacagctcgcgcatcagcggcccggtggtgttgaaaaacatcagcgaactcaccggcacctcggcgtttgccgcccaggtcagcaaagcgctggcccaccgcgaccaggcgctgcaacgcaatgagttcgacaaccagggcgtggccagcaccttctacatgcgccctatcgaaggcaccccgtggttcctcgccaccgccctgcccacctcgctgatcaccgcccagcgcaatgacgtgctcggcaccctggcgctgttgcagatcccgatggtgctgctgctggtgttgctcgcagcgtatgcgatccgccaactggtgcagcgcatgaagacgctgaaaaccaatatcgacgcactctccgccggcgacgccgacctcacgcgacgcatcaccatccgcgccgaagacgaactgggcgccatcggccattcggtgaaccgctttatcgtctacctgcaaaacatgatcggcgaagtgacccaggctaccggcgccatgtcgtcgagcctggcgcagttgcaacagacctcggcgcataccaaccagatcctggtgcggcatgcctcggagactgaccagacggtgaccgccatcaccgaaatgagctccaccgccgacaccgtggcgcaaaacgccgccgaaaccgccgcattcacccagcgcgccaacgagcatgccgaccgttcccgcgtggtcgtcggtgaggcgtccaacagcgtcagcgcgttgatcggtgaagtctccagcgccacccacagcgtggagaacatgcgccaggacgctgcgcgcatcaccgaaaccctcggcgtgatcggcgcaattgccgggcagaccaacctgctggccctcaatgccgccatcgaagcggcgcgggccggcgagcaaggccgtggtttcgcggtggtggccgatgaagtccgtgcgctcgccgcacgcacccaggccagcacctcgcagatcaacgacatgctcacgcgcctgacggcaggcgtgagttcctcggtggcggccatggaaaacacccaggccagttgccagtcggcggcggacgccactgcgcgggtaaataccgggttggatgaaatggccggctccgtcagccacatcaacaacctcagcacccagatcgccacggccgccgagcagcaaagcgcggtgaccgaggagatcaaccgcagcatggtgcagatccgacaaatggtcgaagagctggtgcagagcggccacgctaccgaaaacaatacccagagcctgctggaggcgaatggtcgggtgattaccttgatgggtcgattcaaggtgcgctgataaacggctgagacactcccgtgcaatgtgcgggagtgggactattctgacagttccaagacgcacaggaggtgtgccatgcgcgcagccgagcagtcggtccgcttggagcggatcagtcaggaacgttttatccacgctcccatcgatgccgtttatgactatgtgacccagccggatcgctggcacgaatggcatcccacgtccctcggtgccgacaccggcaccaccggctctctccccgccggcgcccgcttcaccgaaatgatcgacctgctgggcgtacgcgtccccatgagctaccgcgtgcaaatcgcccggcgccccggcgagttcaagaccgtgtttacgtccctggccgtggatggttcgattcattacttcctcatgccccaccagggcggcacactgttcaagcgggtgctgacctatgaaaccgaactgcaactggccaccctgcatgaacgcatgatcgagctgtcggcgattgccctggaccagctcaagcaccggctggaaaacccaccgttcgtataatcttgaaacattctcgccgtgcaggcgctggcttgcctgcgatgacgtcgtcatgatcgccgccatcccaatggtcacctcctgcacgcgagatcctatgaaaaccccattgcgcctggccctgctgtcaaccctgttcaccgccaccctggcccaggccgctgacctgatccccatcgacgtgcaccgcgacgccaactgcggttgctgtaaaaaatggatcagccacctggaaaacaacggcttcaaggtcaatgaccatgtcgaagccgacatgagcgccgtcaagcaacgcctgggcgtagcgccgcgcctgggctcgtgccacaccgccgtgatcgacggcaaattcgtcgaaggccacgtgcctgccgaacaggtgttggccctgcgcaagcgcgacgacctgctgggcgtcgccgcatcgggcatgcccatgggctcgccgggcatggaagtggaaggccgcagcgaggcctatcaggtcatcggcctgacccgtgagggtaaagacgtggtggtggctgaatacccggcgcaatgatcgcgggttacctcgggcttttcttcgcggcgttcggcgccgcgaccttgctgcccctgcaatcggaagcggtgctggtcggcctgctgctcagcgggcattacagcctgtggctgttgctgggtatcgccaccctgggcaatgtgctcggttcggtggtgaattggtggctggggcgctgggtggagcacttcaaggggcggcgctggtttccggtgaatgaccagcaactggacaaagcccgcaagcattaccagcgctgggggcattggacgctgttgctcagttgggtgccgatcattggcgacccgctgacgttggtggccggggtgatgcgcgagccgttgtggcgattcctgttgctggtgaccctggccaaaggcctgcgttatggcgtgctggccgccgtgaccttgcaatgggtgttaatccccacttaatcgccagttaatccttgggcaacagcatccgaaccctctttctcggagccctgcccatgcctctgttccgcgctttttgcatcgccggcctgctcacggccaccgccgccccggtatttgccgccacctacggtcctgaactgcaaggctttgaatacccctatccgctcaagcatttcgagtttcagtcccaaggcgaatccctgcaaatgggctacatggacgtgccggccaatggcaagcccaacggccgcagcgtggtgctgatgcacggcaagaacttctgcggcgccacttgggaaggctcgatcaaggccctgagtgacgccggctaccgcgtgatcgcaccggaccagatcggcttctgcagttccagcaagcccgatcattaccagtacagcttccagcaactggcgctcaatacccaccaactgttggaaacgctcggtattcagaaggccacccttatcggccattccaccggcggcatgcttgccacgcgttacgccctgatgtaccccgcgcaaaccgaacagttggcgctggtcaaccctatcgggctggaagactggaaagcgctgggcgtgccctcgctgagcgtcgaccagtggtatgcccgtgaactgaacgtcagcgccgagggcatccgcaagtaccaactcaatacctactacgtcgggcgctggaagccggagtacgagcgctgggtagacatgtacgccggcctcagcaacggccccgggcatacgcgggtcgcatggaactcggcgctgatttacgacatgatcttcacccagccggtgtactacgagttcaaggacctgaagatgccgacgctgctgctgatcggcacatcggacaacaccgccatcggcaaggacgtcgcgccaccagccgtcaaagccaagctcggcaactatgccgtgctgggtaaacaggtggccaagctgatcccccgcgctaccctggtggaattcccgggcctggggcatgcgccgcagatggaagaaccggagcagttccacaaaacgctgttgcaggggctgaatgccctttaatccaaactttttcgaggcactcgtgaatgtcggtacagattgcagtcattgatgattggcagaatgtggccagtggcgtggtggattggtcagtccttgaagcggtgggccaagtgcacttcctgcacgactacccggcggataccgccacgatgatcgagcgtttgcgggagttcgaggtgatttgcgtgatgcgcgagcgctccagcttcgacaaggccctgctgcaaggtctgcccaagctcaaattgctggtgaccggcggcatgcgcaacgccgccatcgacattcccgccgccaagaccctgggcatccaggtctgcggcaccgacagctataaacacgcagcccccgagctgacctgggcgttgatcatggcctccacccgcaatctggtggccgaagccaactcgttgcgtgccggcgactggcaggtggggctcggcggcgacctgcacggcaagaccctggggattctcggcctgggcagcattggccagaaggtcgcgcaatttgcccaggtgttcggcatgcgcgtgattgcctggagcgaaaacctcacgccggaacgggcagtcgaggttggtgtgacgtgggtcagcaagcaagcgctgtttgaacaggccgacattctcaccgtgcacctggtactcagcgagcgcagccgtgggctggtggatgcccaggcgctgggctggatgaaacccggcgcgcgcctggtcaacaccgcacgcgggccgattgtggatgagcaggcactggtgcaggccctggaaagcggccgcctgggcggggcggcgctggatgtgtatgccgaggagccattgccggcggatcacccgttccgcaggttaccgaatgtgctggccaccccgcacgtgggctatgtgagcgagcagaattaccggcagttctattcacagatgatcgaagacattcaagcctgggccaaaggagcgcccattcgcgtgctgggctgacgcaccatcccagggcgctccgcacaagcgcggcgcccacccgaccttgtagtgagcaggcttgccctgcgctggggcgcgcagcggccctgaatatcggttcaatcttcgaaagtcccggttgggagcgcttcgcactccagcgcagggcaagcctgctcaccacagggtccgctccaccctggcatatggttacaatttttttgtcctacaaaatcttcctagaaaccctacaggctctgggatctgtcctagactcatgaccgatgggtccgttccaaaacaaaaaccccgcagaaaatctaaacttttcaactcggccattggtcaagttttaaggtacgacgagcgcacacggttccagcccgatgcccgtccatccaatctatatctgccaaccgtgcaactggcataagccttgccagatctgtacagcgcttgtgcgcgtggccgcaggatgcggtcgacggagttaatggcagccggccattagccgaccaacacgtggagagaactatgatcagtgccgcagcaagtattcagggagagcgtgttagtcagaccgttggcggggcaaccgcgttggctgacctcaccacggtgcggccggttcccacctacaaccccaaccgcaagaaagtcctgtttgtgacctccgagttcgccgacctggtgaagaccggcggcctgggcgacgtctccgccgccctgccccgcgccatggcccacctgcacgatgtgcgggtgctgatccccggttatccgcaggtgatggaaagcgacaacccgatccatatcatcggtgagctgggtggccacgccgcgctgccgccgtgcaagatcggacgcatggacctcaaggatggcctggtcatctatgtactgatctgccccgagctctacgagcgcgaaggcacgccgtacggcgccaacaacggccgcgactggccggacaaccatattcgcttcgcccgcctgggcctggccgccgccgacatggccgccaacctggcgcagatccactggtgcccggacctggtgcacgcccacgactggcccgccggcctggccccggcatacatgcactggcgtgggtcacgcacgccaaccctgttcaccattcataacctggcctatcaaggcgtgatcagcctggcgtcgacgccagagctgggcattccaccccacgccctgcaacaggaaggcatggagttctacggcaagatgtcgttcctcaaggccggcatggcgtattccagccacatcaccacagtgagcgccacctacgcccgggaaatcaccacacccgagttcggctgcggcctcgatggcttcctggccagcaagacccagcaagggttgctcagcggtattcccaacggcatcgaagacagttgggaaacctccaccgacccgcacctgacgcacaacttcaacattggcgactgggacggcaaggcggtcaacgccgcccaggtacgcaacctgttcggcctgcatgattcgagcggcccgctgttcgccgtggtgtcacgtctggtgttccagaaaggcctggaccttaccgaagcggtggccagctttatcgtcgagcaaggtgggcagatcgccattatcggtcgcggcgagccggaagaagaaaacgccatgcgtgaactggcgctgcgctttcccggccagatcggtgtgcgcatcggcttcaacgagaccgatgcgcgccgcatgttcgccggcagcgatttcctgctgatgccgtcgcgctacgagccctgcggcctgagccagatgtacgcccagcgcttcggctcgctgcccgtcgcccgcaacaccggcggcctggccgacaccatcgaaaacggcgtgaccggctttctgttcaatgaatccacggtcgacagttacaaagaagccttgagccgcgcgttcaaggtgtttgccttccctggcctgctcaatgccatgcgcagccgggcgatgacccaaccgttcaactggagccaggcggtggaaccctacgccgaactgtacgagcagctggtggctaaagcactggggaaatccgctaaataatcaacgggaggtctctatagatgccgttacggactctggaaacctggccccacggcgcaatcatgctggacgcgcaacacacgcgtttcgccttgtgggcgccagacgcattttatgtcagcgttgaattggaacacggcaagtccatcgccatgctgccccaggcagatggctggttcgaaaccgaaatagcgtgcccggcgggcacgcgctaccgcttcaatatcgatggggaaatggatgtacccgaccccgcgtcccgcgcccaggccgccgatgtgcacggctggagcgtggtggtcgactccctcgcttatcactggcgccacagcacctggcaaggccgcccctggcacgaggcggtcatctatgaactgcatgtcggcgccatgggcggttatgccgccatcgaaaagcacttgccacgcctggccgagctgggggttaccgcaattgaactgatgccgctggcgcaattccccggtgatcgcaactggggctatgacggggtcctgccctacgcgccccaagcttcctacggcacgcccgaacagctcaagcacctgatcgacagcgcccatgagcacggcctggcggtgatcctcgacgtggtctacaaccacttcggcccggacggcaactacctgggccagtacgccaagggtttcttccaggaagacgtgcacacgccctggggcgccggcatcgatttcaatcggcgcgaggtgcgcgactttttcctggataacgccttgatgtggttgctcgaataccgcttcgacggcctgcgcctggacgccgtccacgccatcgacaacccggactttctcaaggaactggcacaccgcgtgcgcgagcaggtggataccggccggcacgtctggctgatgctggaaaacgaactcaaccaggccagcctcctgcaacaggatttcgacgcgcaatggaacgatgacttccataacgtcctgcatgtgctgctgaccggcgaaaccgacgcctattacagcgacttcgccaaggagcccacggccaaactggcgcgctgcctgggcgaaggttttatttatcaggggcacaccacccggcacgggcatgagcgtggcgaacccagtgggcatctgccgccgagcgcgtttgtggcgttcctgcagaaccatgatcagatcggcaaccgcgccctgggcgagcgcctgcatcaactgtgctcgccacaggcactgagggcggcgaccgcactgctgttgctctctccgatgatcccgctgatgttcatgggcgatgagtcgaatgcccgcgagccgttcctgtttttcaccgatcaccatggcgaactggcagaagcggtgcgcgaaggccgccgcaatgagttcaaggatttcgccgcgttccaggacccggaacgacgcgagcgcatccccgacccgaatgccctgccgacctttttgcagaccacgccgaacttcgacgacaacgaacacacccagctgtatcgccagttactcagcctgcgccaccgtcatatcgtgccgcacttacccggcagtatggccctgggcgccgaggtcttggccgaaggcgccgtgagcgcccgttggcgcctgggcgatggcagcctgttgcagattgacctcaacctgagtgccacgccgctggatcagccggcgacggcgcctgtcctgtttgaaacgcctgccagtaccggcgcacacctgccgccgtacagcgcacgcgtcaccctatcccctgttggagagcacccttgagcgaagcgaacctggaaatcctcgccagccgagcgggcctggccgtcgattggatcgacgcaaacggccgcccgcaacaagtgaaacccaacgccctgcgcgccgtcctcaaaggcctgggccaccccgccgacaccgatgccgaggtcaacgccagcctgctggccctggaacaggtgcaacaagacaaacacctgccgcccctgctgaccatcgacagcggcgcaggcctcgacctggcgcgctacttcgaaccggacaccctgtgccgggtcagccttgaagacggtgaaaccctggagttgcgcctcgatggcgacgcggtcctgcccggcgtcatcgccctcggctaccaccaagtgcacattgccgaccagaccttcaccctggccgtcgcccccacccactgctacagcgtcgccgaagcggtcgacaaccgccctgcccgcgcctggggcctcagcgcgcaactgtacagcttgcgccgcctgggcgatggcggcttcggcgacaccctggccctggagcacctggcccgctcggcggccgagcgcggcgccgacgccctggcgatcagcccgatgcatgcgatgttcagcgccgacaccgcgcgttacagcccgtactcgccctccagccgcttgttcctcaacagcctctacgcgtcgccgggttgcatcctgggtgagcgcgaagtgcgcaacgccatcgaggccagcggcctggcggatgaactgcacgacctggagcaacacagcctgatcgactggcccactgccgccaacgccaaacagcgcctgctgcgtgcgctgtatgaagacttccgccatggccaccacccgcaacacgccgacttccagagtttccgccaggccggcggtgaggccctggaaaaccactgccgtttcgaagccgtgcaagcgacccgcgccgctgccggtgaagacctcgactggcgccactggccagaagactggcgcacgccgcagagcccggcattggcgcggttcgccgaagaccaccgtgacgagatcggctacttcgccttctgccaatggctgatcgcccgttgcctggagcgcgcgcaacaagccgcacgcggcagcggcatgggcgtcggcctgattgccgacctggcggtgggcgccgacggcggcggcagccaggcctggagccgccaggatgaattgctcgccgacttgaccgtgggcgcgccgcccgacatcctcaaccgcgccggccagggctggggcatttccgcgttctcccccgaaggcctcaagcgccacggttttcgcgccttcatcgaaatgctgcgcgccaacttcgcccacgccggcggtttgcgcatcgaccacgtgatgggcctgcaacgcctgtgggtgatccccatggacgcctcgccgcgtgacggcgcgtacctgtattacccggtggacgacctgctgcgcctgctggccctggaatcccaccgccaccaggccatcgtgctcggtgaagacctgggcaccgtgccggacggcctgcgcgaaaaactcatcgcccgctcgatcctgggcatgcgcgtgttgctgttcgaacagaaccacgaaggccagttcaagccgatcctcgactggccggacaacgccctggccaccaccagtacccacgacttgccgaccctcaacggttggtggcacagccgtgatatcgaatggaacacccagctcggcctgatcgatgcgcccaccgtggagcaatggagcgagcaccgcctgcgcgaacgccaggcactgcgccaggccttgagccaggacccgcagaacttcgtcgaagagatccgcaatgaaaccgaccacatgatcgacgccagcgtacgctacctcggccacacccgcgccccgctggtgctgctgccgctggaggacgccctgggcgttgaggaacaagccaacctgcccggcaccaccgacacccaccccaactggcgccgtcgcctgccgggtgaggcgtctagcctgctcgacaatgccggcgccgcccgccgcctcgaactgttggccgtcgcgcgcaaccaagcctatgagcgtgaccgatgaaagccctgcccctgcgcgccacccagcgcctgcaattccataaaggttttaccctcgatgacgcggtgccgctggtgccgtatttcgcccggctgggcatcagtcacctgtatgcctcgccgctgctcagcgcccgcgccggttccatgcacggctacgatgtggtcgaccccaccacagtcaacccggaactcggcggcgagccggccctgcggcgtctggtcgcggcgttgcgtgaacacgacatgggcttgatcctcgatatcgtctccaaccacatggccgtcggcggtgccgataacccctggtggctggacctgttggaatggggccgcctgagcccctacagcgagttcttcgacattcagtggcactcgccggaccccttgctcaaaggccaattgctgatgccgttcctcggcagtgactacggcgaagccctgcagaccggcaccctgaccctgcacttcgatgccgaccacggcgcgttctacgtcgagcattacgaacaccgcttccccatctgccccaaggattacgccgcgatcctgggcaccgatgaatcgctcaagcccctggccgagcgcttcagcgccctcgcctaccaggacgacgcctaccacgaggccgcgtggctcaagcaagcgctggccgagcgcgccaccgaggtgctcccggcaatcgaacaacgtttgacggccttcgacgggcgtcagcccgagggcttcaaacgcctgcatcaattgctcgaacaacaggcctaccgcctggccagttggcgcacggcggcggacgatatcaactggcggcgcttcttcgatgtgaatgaactcggcggcctgcgcgtcgagcgcagcgctgttttcgaagccacccacggcaagatcttcgaactgatcggcgaaggcttggtggatggcttgcgcatcgaccatatcgacggcctggccgacccacgcggttattgccgcaaactgcggcgccgcgtggactcgctgtcgcctgagcggcacttgccgatcttcgtcgagaagatcctcggcgaaggcgaaaccctgcgcgacgactggcaggtggacggcaccaccggctacgagttcatgaaccagttgtcactgctgcaacatcacccggacggctttgcgccactggctgcgttgtggacccgtcacagcgaacggcctgcggcgtttatcgaagaagcgcaattggcccgccagcagatcctcaacggctccctcggcggcgacttcgaaagcgtggcccaggccctgctgcaagtggcccgcgacgatgtgatgacccgcgacctgaccctcggcgccatccgccgggccttgcaggaactgattgtgcatttcccggtgtaccgcacctatatcagcgcccgtggccgcagtgccgccgacgacaggctgttccagcaggccatggacggcgcccgcacgaccctgggcgaaggcgactggccggtgctcgaccacctggccaactggctgggtggccagccgtggcgcaatcgcccggtgggccgtgaacgcaagatcctcaagcacgcctgcgtgcgcttccagcaactcacttcgcccgccgccgccaaggccgtggaagacaccgcgttctatcgctcggcggtattgctgtcgcgcaacgacgtgggcttcagcaccgagcagttcagcgcgcctttggccgacttccatggggtcaaccagcaacgcctgcagagctttcccgacaacctgctggccaccgccacccacgaccacaagcgcggcgaagacacccgcgcgcgcctggcggtattgagtgaatgtgcgccctggtacgtcgagcaggtcgagcagtggcgcgccctcgccgcaccgctgaaggcggaggcaaacacgccatcggcgggcgacgagttgatcctctatcaggtgctgctgggcagttggcccctggaccagaccgacgacttcgagggctaccggcaacgcctgtggcagtggcagcaaaaagctctgcgtgaagccaagttgcaaagcagctggagcgcgcccaacgaagcgtatgaacaaggcgtcgaagccttcctgtcgcggctgctgctcagcgatgaaggccacacgttacgcactgccatcggcgccgctgcccaggccatcgcgccggccggtgcgctcaatggcctggcgcaatccttgcttcgcatgacggtgccgggtgtaccggacctgtaccagggcgatgagttctgggacttcagcctggtcgacccggacaaccgccgtccagtggatttcaacgcccggcaacaggcactggataccccaccggacatcggcgaactgttgttcaactggcgcgacgggcgtgtcaaacaggcgttgattgcccaggtgctgggcttgcgcaaggcctgtcccgagctgttccgcaacggcacctacacaccgctgcaagtgcacggcaaacacgccgaacgggtggtcgcgttcgcgcgtgaataccagggcaaacacctgctggtggtggtaccgaggtggccgcaggacctgcttgaaaacggtgtgcatccaatgatcaatgcgcaggtttggggcgatacgcgggtgaaattaccgttcgccgcgtcaaccaaaaactggaagggactttttcatacaggcgcagtcacaccagacaaggagctgttgatcagcactgccctgggggatttcccggtcaatgtctttatcaatcctgatgatcaagaaagctgaaaattctctgtgaggagcattgcgatgagtactgacgaaaaacgcataaaagagttggcgcaccagatctgggagtccgaaggcaagccccatgggcaagacgcgcggcactgggagatggcgcgcaaactggccgaagccgaagcgctgacgccgagcaaacccaaggcccccgccaagcccaagccaccggtcaaagccaagccggccgcgagcaagccggcgccaccggccgctaaaaaaccacccgccgcgaagaaacccaagccttaatcccccacctcttgtcggcgctgtcggcaagaggtgattccacctaccagactctcagctgaaatttcgtcggcacggccgcgttcggcctgaagaaagacccttgcaggagcaactcaatgagcaaacccgataaaaccccatcgacgccgggcaacgaaccgtcgcgaatccgtgaaggtttgcccttcccgctcggcgccacctgggatgggctgggcgtcaacttcgccctgttctcggccaacgcgaccaaggtcgagctgtgcctgttcgacgacaccggcgaggtcgagctggaacgtatcgaactccccgaatacaccgacgagaccttccacggctacctgcccgatgcccatcccgggctgatctacggctaccgcgtgtacggtgcgtacgacccggccaacggccaccgcttcaaccacaacaaattgctgatcgacccctacgccaagcaactggtgggcgaactcaaatggtcggaggcgctgttcggctacaccatcggccacccggacgacgacctcagcttcgacgaacgcgacagtgcgcccttcgtgcccaagtgcaaggtgatcgacccggcgcacacctggggcaacgaccaaccggtacgcgtgccgtgggaccgtacgatcatctacgaaacccacctgcgcggcatcagcatgcgccacccgtccgtgggtgaagctgtgcgcggcacctgcgccgggctgatggaagacgacgtgctcaaacacattcgtcagttgggcgtgtcgtcggtggagctgctgccggtgcatgcgttcgtcaatgaccagcacctgctgcaaaaaggcatgaccaactattggggctacaacagcatcgcgttttttgcccccgacccacgctacctggccagcggcaagatcgccgagttcaaggagatggtcgcgcacctgcatgagcagaagctcgaagtgatcctcgacgtggtctacaaccacaccgccgaaggcaacgagcgcggcccgaccctgtccatgcgcggcatcgacaacgcctcgtactaccgcctgatgccggacgacaagcgtttctacatcaacgactccggcaccggtaacaccctggacctgagccacccctgcgtgctgcagatggtcactgactcgctgcgttactgggcgacagagatgcacgtcgacggcttccgcttcgacctggcgacgattcttggccgctaccgcgatggtttcgacgaacgccacagcttcctcgtcgcctgtcgccaggacccggtgctgcgccagttgaaaatgatcgccgaaccctgggactgcggccccggcggctatcaggtgggcaacttcccgccgggctgggtggaatggaatgaccgcttccgcgacaccgtgcgtgccttctggaaaggcgatgacggccaattggccgacttcgcggcacgcatgaccgcctccggcgagatgttcaaccatcgtgggcgccgtccctacagctcggtgaacttcatcaccgcgcatgatggtttcacgctgcatgacctggtgtcgtacaacgacaagcacaacgaagccaacgacgaaaacaatcaggacggcagcaacaacaacctgtcctggaaccacggtgtcgaaggcccgaccgacgacccgcaaatcaacgccctgcgcctgcgtcagatgcgcaacttcttcgccacattgctcctgtcccaaggcacaccgatgctggtggccggcgatgaatttgcgcgcacccagcacggcaacaacaacgcctactgccaggacagtgagatcggctggatcaactgggacctggacgaagacggcaaggccctgctcaaatttgtgaagcgtttgatcaagctgcgcctggcctacccgatcctgcgtcgtggacgcttcctggtgggcgactacaacgaagacatcggcgtgaaggatgtcacctggctcgcgccggatggcaacgagatgaccaccgaacagtggcaggacagccacggtcgctgcctgggcatgttgatggatggccgcgcccaggaaaccgggattcgccgtcccggcgccgacgctaccttgctgctggtggtcaacgcccatcacgacatggtcaacttccgcttgccgccggtgcccgaaggtgagttctggacctgcatgctcgacaccaacgagcccgccgtacgcggccaggaacgctttgagttcgatcacgagtacgccgtgaccggccgttcgctgttgcttttcgagctgcagcgcgaagacgaggtgtgagatggctctgcatggattccttcaaggcttccggggctatgcggacacgcaagccctgggcgacgccctgaaggcgcttcaggaagaaggcctggaccacctaccgctgcccggcggcggtcagaccctggcgcggttcagtcgcctggcgcaggtggcgggtcatgacctgcgcctgtgcaagctgttcgaaggccacaccgatgccctggcaatcattgccgagctcaactccccactgccgcccttgggcagcacgtggggcatgtgggccgccgagccgccaacggccaaggtgcgcgtgcaccaggagggccatcgcctgcgggtgcaaggccgcaaggcctggtgctccggcgcggcggtggtgagccatgggttgttgaccgcctgggacgaagacgatcgccagcagttggtggccgtgcacatggatcaacccggcatcgtggtcagcgatgaggggtggaacgccgtgggcatggcagccaccggcagtgtggaggtcgtgttcgacggtgcctgggggctggcggtgggcgggccgggagattacctcgcccgcccagggttctggcaaggcggtatcggtatcgccgcctgctggtacggcgccgcgcagcgcctggctgaggtcttgcgcgcgcagtgcagtaaacgcccggaaccccacgccctggctcatctaggcgccgtcgacagcgcactgaacagcgccgcctgtgtgctgcgtgccagcgcggcacagatcgaccttgagcccaaggctgatgcccggcaattggcccagcagacgcgggcctgtatcgaagacaccgttgagcaggtgctgcgccacgtcgggcgcgccgtcggtgcgggtccctactgcaaggacccgcactttgcccagttgatggcagacctgccggtgtatgtacgccagagtcatgccgaacgcgacctggccgggctcggagagctggtggccggtgaacccacagggaggtggcagttatgagatccaatccgatcgttggccagggcacgccgctgcatcactggcaggcctcgccgaaaatggccgacttgccgtcgatcagcgtcgagcagttggtgcccgccggccaccgtgcggtgatcattgcaccgcatccggacgatgaaatcctcggctgcggcggcctgatgcagggcctggcggcgctgggtcggccgatccaattgatttcggtgaccgatggcagcgccagccaccccggctcgcagcgctggccagtggagcgtttgagcgtggtgcgcccgcaggaatcggcccaggccctgcaccgcctggggttgccgctgcacagtttgaaatggctgcgcgccggttttaccgacagccaggtggcggcacgcgaagctgacctcgtggcgtttatccaacgctacctcaagtctaccgacgtggtgttcaccacctggcgcgaagacggccattgcgaccatgaggccgtggggcgtgccagcgcccaggcctgcgcggcggtcggcgccaccctgtatgagctgccggtgtggacctggcattgggcaacacccgaagacagcgtggtgccctggcaccgtgcacgcaagatcccgctgacctgtgaggccgtcgctcgcaaacggcatgccatccacgccttcgccagccaactggaaggcgacccgcagatcggcctcgcgccggtgctggcgccctacgtggtggagcgtctgttgcaaccctttgaagtggtattcgtatgagtgtggccacgccttatttcgaccagctgttcgccaataacgatgatccctgggcctttcgccaacgctggtatgagcggcgcaaacgcgcactgaccctggcgatcctcacgcggccacgctacgcctcggtgttcgaacccggttgcgccaatggcgagctgagtttcgaactggcaccgcgttgtgaccgcctgctgtgctgcgacaccgccgcggccgccgttgacctggcgcgcactcgcttgctggggttcccccaggctcaggtgcagcagtgccgcttgcccgaacagtggcctgcgggccagttcgagctgatcgtattgagtgagtggtgctactacctcgacgccgatgacctgggccaattgatcgatcacgcccgcaccgcactgaccgccgacggccaattgctggcctgccactggcgcgcgcctatcgacggttgcccgcaaacggctgagcaagtgcacgccctgctccagcaacgcctggacatgccccgcatcgccagccaccacgaacctgatttcctgctcgacctgtggagccgcgacggcacctcggtcgccacccttgagggcctgcgatgatcggcattctgatcccggtacataacgaagaggcgttgctcggcgactgcctgaaagctgcgatgatcgcggccagccatcccgggttgctcggcgaagcggtgactattctggtggtgctcgacagctgcagcgatgccagcgccgccattgcccaggcctacccggtgcagtgcctggaagcccaggtacgcaacgtggggcatgtgcgtggcgtgggtgcgcggcatttgctcaatcagggcgcacgctggatctcctgcaccgatgctgacagccgggtggcccccgactggttggtggcccaattggcgttgggcgtggacgccgtgtgcggcaccgtcacggtggatgcgtggagcgagggttttgatcccgccgcgcagattcgctacctccagggctacgaggctcgcgacggtcatcggcatatccacggggccaacctgggggtgagcgctggcgcgtacgtgcgtgccggtggtttcgagccgctggcgtgccacgaggatgtgcaattggtgcgcaacctggagctgtgcggcgcctccatcgcctggagccacggcccgcaggtgattaccagtgcgcgcctggacgcccgtgcacaagggggattcggcgattacttgaagagcctgatgcatgccacgtaaaaaaacgccgttaccgaatgtgaaaccgcgcaatccttgtctatgctgagaacgccttgctggcattccagggttggggtgccatgcagccactacggcggagcctgtggtggaaacaagagagtcgtcccgtcaacggggcacgaccccgcatcaaccgacaaggatgtgacaccccatgaagcttgcttccttaagcgacggccgccgcggccccgcgcaagtctggaacagcgccccgcagttggcgcaaatcccccccattacgccctcctcattagtgccgcctggcgcacgcgtggtgatcatcgcacctcatccgggcgatgaggtgctggcctgcggcggcttgctgcaattgctcagcacgctggaacacccgctgcagctgatctccatcaccgatggcagcgccagccacccgggctccaacgtctggccggcgagccgcttgagcgtggtccgcccccaggaaagcgccgaagccctgcgccgcctgggcatgccgctgcacagcctgaagtggattcgcggggggttttgcgacaacgccctcgccgcccgcgagccgcaactgagccaattcattgcgcgctacctgcagcccggcgatgtggtgttcagtacctggcgcaacgatggcaatgacgaccatgatgcggtgggccgtgccagtgccaaggcgtgcagcctggtgggcgcgcagctgcatgaactgccgatctgggcctggcactggccggcccgcgaaggcgcgatcatcccctggcaacgcgcgcgcaaggtacgcctggacacctggaccgtggcgcgcaaactccacgccgcccacgcctatgccagccagctggccggggacccacagatcggcctgccgccgatactggcccaggtgctgctggagagaatgcgcgaaccgtatgagatcgtgctgtcctgaaatccaactcgttcatacctgttaattctgacagtagcggcctggcgaatgtgtggctagggtggaaaaagcgctgcaccgcttcaggtgcagtcgagaaagccatgccaaccctttgcattggccggtgttttcagaaacggttaacccgctgtccctgctccgtatcgcgcatcacgttgtcatggtctggcccgcacctgccttcgcaggtgccgggacaactctcccctcaagtgaggacggatcatgcgcgcacggacactctcctggttgtacctgatcgtcatggcggtgtggccgccgggctcttatggcgcctgcaccatcaacagtggcgccggcgatgacacctccaactgtgacatcggcacggcgccgggctttaccgataacgcgggtaacaacacactgaatatcaccgcgacgggccgggtgaccggcaatgtgacctttggcgcgggcaatgatctggtggatgtgaatgggccaagcgccgggattgatgggaacctcaaccagggcgatggcgcgaatatctttcggctcaatctgggcagcattaccgggtctgtcactcaaggtgatggccaggacgtggcgcagattactggcggtcaagccggcgccgtgcgtcaaggagcgggagtcgacaacctttccatcagtggcgggactatcgcttcgctcgaacagggcgacggtctggataactttttcatgagtggcggtacgatcaccggtgcgtttgaagacggcgaccgagccaggatgagcggcggcaccatcggccgcgtcgacatgaaactcgataacaacctgttcgacatgtcgggaggccgcatcatcggcaacctggtgaccggcttaggcaacgacaccatccggatctcgggcacggcgtttgtgggcggcaatatcagtgtcagcgccggtgatgatcaggtgaccgtctcgggcggcgaggtgaacgggcagatcctgctcagtttcggcaacgaccacttcatctggaccggcggcaacctgcactcgtttgtgcggatgggtgaaggggacgacatggcactcgtgcagaatctgacgagtgctcagttggcggcagcgcaattggtggacggcggcctgggcaacgacaagctcaccctggacaacaccaaggccggggatccgggcctattgcccaactgggaagccatccagctggacaatggctccgaactgacgctgagcggtacgaccctcaagctgggtgacagcagctccggtactggcacgctggcgctggatggcacgagcaagctgctggtcgggaccggcgtcatcgaagcctttaccgccggccagttggttaccgtcagcaacagcggcgtgatcgacatgaccaccggcagctccagcaccagcgactcattgaccatcaggggcaattacaccggcaatggtgggcgggttgaactgcaaagtgtgttgggcggcgacggctcgcccagcgacaaactggtgattgaccaaggtgccattgggggcagtacaacgatcagcgtgaccaacctggggggtgcgggtgcagcgacgctgcaggatggtatccaggttgtgcaggcccttaatggtgcctccggcagtgccaacgccttcaccctcgccggcccggtctccgcgggtgcgttcgactaccgcctgttcaagggcggtgtaaccgcaggcacggcaaagaattattacctgcgctccactgtcccggtgcagccaccaggccctgagatcatcgtacctttaccgagcccgggcgagcctcccccccctaaaccagggcccgatccaatccccatctaccgcaaggaagtgccgatctatgccgcaatgttcccggcggccgaccagatcgtgcgcgccacgctgggcacttatcacgagcgcatgggcgaccagaaccttcgacagagcagccatgcgctggacggctggggccgggtctacggcagcagcagccgtcaagggttcgccggcacggtgagcccgacgctggacagcacgctcgagggcttccaagtgggcagtgatgtctacaccaccaccgacgacagcggacgcaaccagcgcgttgggctgtttgtgggccacagcacactcaaaggcaacgtcaagggcttcaacggtggctggcaagacctggacgccggcaaaaccaccttgcgcgccgatagcctggggatttactggacactgatcggggctaatcaagcgtatgtggatctggtgctgatgggcagccggttcaacggcaacaacgaatcagaccgcggcgtgaagatgaaaacccgagggcataacatcacagcctcagctgaagtcggctggccgctccgggccagccaaaactggacggtagaaccgcaggcccaagtgatcgtcggcaagacaaggctcgacagccagaacgatggcatttccgacgtcaagtatgacgccgataccagcgtgacctcccgcctgggcttaaggctgcgcggcgactacaacatccatggcatggcgtggcagccctatgcgcgcgcgaacgtctggcatgccagcgccggggacaacagtgtgatttacaaccacacgacccggatcgataccgagcagaaatccaccatccttgaagtcagcctgggcgccaccttgcaggtagcgcccgatgtgagcctgtatggcgaagtcggctacaaccgcaatctggacagcaacacctacaacggccgcgaaggcactgtgggtctgagggtggcgttctaggtttgtatcgcagtgtgtacacagcccactgcgatacacagcctttaactcggcgggtttcctgaaacaggccagatacagcccggcgttcaactgagcacccggcacacatccagccgcaggaggctcgccatgcagactcagttgaaccgccgttccacacccctttttctggcctttgccctggcgcaattcggcatcctgggcatggcccacgccgaaatgcccgaggctgcgaccaaagttgtcgccagtacccaaagcgccttcggtgccctcaagcacgtcaaggctgggctgctggacgtggcctacgccgaagtcggccccaccaccggcccggcggtgatcctgctgcatggctggccctacgacattgacagctacgcccaggtcgcgccgttactggcggccaagggctatcgcgtgttgatcccttacgcacggggttatggcgatacgcgtttcctatcggctaacaccccgcgcaacggccaaccggcggcgctggccagcgatgtgatcgacttcatggacgcgctgaagatccagcaagcggtgctcggtggctatgactggggcgcacgctcggcggacatcgtgtcggcattgtggccggagcgggtcaaggcgctggtgtcggtcagcggttacctcatcggtaaccaggcggccggcaagaacccactgccgcccaaggctgagttgcaatggtggtaccagttctacttcgccaccgagcgcggcgccgccggctaccagaaaaacacccacgacttcgccaagctgatctggcaactggcctcgccgcagtggaagttcgatgacgccacgttcgatcgcagcgccaaaggcctggagaacccggatcacgtagcgatcactgtgttcaactaccgctggcggttgggcctggtgcagggtgaaacgaaatacgacccgctggaacagagactcgcccaggcgccgtccattggcgtacccaccatcaccctcgaaggcgacgccaacggcgccccgcacccgcagccggaggactacgccaagcgctttaccggcaagtacgagttccggctgatcaacggtggcgtcggccacaacctgccgcaggaagcgcccgaggcgtttgccaaggcggtcatcgatgcggatcacctgtgatgaagcgcctgtgcatggccgcattggccctcgcgagttcggctggcaccttcgccgacagcgccccctcgccgatctacggcgtgactattcccgacggctaccgccaatgggaactggtggctccggcccaggaagccgacccgttgaacgagctgcgcgtggtgctgggcaacagcgctgcgctcaaggcttatcgggagggcacgttgcctttcccggatggcaccgtcctggccaagttggcgtggaaacacgagcagtcaccggatttcaagaccgcgtccatccctggcgcggcgaccacggtgcagttcatggtcaaggactcgaaaaaatacgcgtccaccggtggctgggggtttggacgcttcatcaatggcaaaccagccgatgaagcgcagcaccagacgtgttttgcctgccaccaggcgttggtgaaagaccgggattatgtcttcaccaggctggcaccctgaaagccagcccgttcaaggtctctggtcagaactggcgacaaataccctgtggcgagcgggcttgttgtggtgagcgggcttgccccgcgctgggctgcgaagcagccccaacaccggcagccgaagagtacctgattcaccgcatgcctccttccagggtcgcttcgcaacccaacgcggggcaagcccgctcaccacaaatgggagggtatcagccagatatggccggtttttcaaagactttgaaagggctgaccctgaaagcgcgaaaactgataggcgattcccagccagatgaaccaggccggcatcacgcacagtgccaggcgtgtatcagggcgcaacgccagcaggcccagcacaaaggcgagaaacgccagggcaaaccaggccattggcacaccaccaggcatcttgtaggtggattgggcgtgcaggtccgggcgttttttgcggtaggcgatgtaggacgcgaggatggtcgaccaggtgaagatcaccaggatcgccgacaccgtcgacacgatggtgaaggcggtcatcacctccggcaccacaaacagcaacaccagccccagcaacatcagcaagctggtaaacgccaggctgataaacggcacgctgctgttcgacaagcgccggaagatccccggcgcatcacccaggtcggccaaaccgaacaacatgcggctggcggaaaacaccccgctgttggcagacgacgccgccgaggtcagcaccacgaaattcacgatgcccgctgcggcggggaaaccggcgaccaggaacaattcgacaaacgggctcttgctcggtgacacctgctgccaggaggtcaccgcgataatgcacgccagggccagcacgtagaacaggatgatgcgcagcgggatcgagttgatcgccttgggcaaggtcttttccggcgcacgggtttcggcggcggcggtaccgatcagctcggtgccggcgaaggaaaagatcgccatctggaacccggcaaaaaagccgaacaggccgttgggaaatgccgcttgtttatccaggaggtggctcaacgaagcggtgacgccggtgggcgaaacgaaggaactggcgatcagcaccccactcaccccgatcaaggtcacaacggcgatgatcttgatgatcgcgaaccagaactccacttcgccgaacagcctgaccgtcagcacattcagcgcgaacagggtcagcaacatcgccaccgccggcatccaggccggtacatcggggaaccagtactggaagaaaccgccgaccacaacggcgtcgcccaccaccgctacgctccagctcaaccagtacgaccagccgagaaagaacgccgcacgcggccccaggtaagcaccggcaaagtcggcgaagctcttgaagttgaggttggacagcagcagctcgcccatggcgcgcatcacgaagtacacgaacagcccgatgatcatgtagatcaggatgatcgaggtgccggacagcgcgatgatcttgccggagcccatgaacaggccggtgccgatcgcgccgcccatggccatcaactggatgtggcggttgctcagggtacgttgcaacgcaggctgttcacacagcccgggcgtggttgttttcatcacaaaacctcttgttatgtttttgagttttggcagaagaaaagtcgaggggtcgttgttattggctgtggcgttcgaaaccgtgcagcacgttgaccgcattgatgccgatctcatcaaccatgtagccgccttccatcacgaacagcgtgggcacgccgacggtggcgatgatctcgcccatgccgaggaagtcttcgctgtcgaggaggaagtggctgatggggtcgtccttgaaggtgtcaacgcccagggagatcaccaacacttcaggcgcaaagcggcgcagttgctggcaggcgtctatcagggcggttcggtaatgggtccaggtggtgtttttcggcaacgggtagttcaggttgaagccctcccccgcaccgacgccgcgctcgctgccggcaccggaaaaatacgggtaagacaccgtcgggtcgccatgcagggaaatgaacatcacgtccgggcggtcatagaaaatattctgggtgccattgccatggtgaaaatccacatccagcaccgccacacgcgtggcgccctgggtgatggcgtgctgtgcggcaatcgcggcgttgttgaggtagcagtaaccgcccatgtattcacgggccgcgtgatggcccggtgggcggcacagggcaaaggcgctgtgatggccttcgtcgagcaacgccaggccggtcagtgcgatgtcggcgctggtcttcaccgcctgccaggtggtgcgggtaatcggcgaaccggcgtccatcgcgtaaaaaccgagcttgccgtcgatgaacgccggcacctgctggttggccaggtcgcgtaccggccacaccagaggcaaggcgtcatggctgcggccgatggcagtccattcggcccaggcggtttcgaggaacgccacgtagcgttcgctgtgggcggcgacgtagcaggcccggtcaaaacggcgcggcgtgatgatatcgcccagcccaacctgacggacccgatcacgcacggtgtcggcgcggctgggttgttcgaacgagggtttgagcacaccgtccttgagttcggtgccatggtgcaaacggtgggcttcgctgaaaacagtcaacatgtgagggcatccgccagtaaaagacagggtctattttgttctggcggcagtgggctttctttgcttttacttacggcactgttaggtttatcgggaatatttacctcattggcgcacgattatgaaaaataaaaccaaacaggtcgttcttgatgataccgatctcgccatcctcgccctgctgcagcaggacgccagtatttccaacgctcagctgagtgagcgcctgtccctgagcctcacgccctgctggcgccggcgcaaacgcctggaagaagaaggcgtgatcaaggactaccaggccaacctcgaccgcaagatgctcgggctggacatcctggcgttcgtgcatgtgcgttttgcgatccacaccgaccatgcgcccgacgccttcgaggcggtggtgaaagaactgccacaggtgttgtcgtgccacaagatcaccggggatgccgattatttgttgcaggtactggctgaagacctggacagctacagcgagtttgtcgagagcgtgttgcggcggcagttggggattgcctcgatacagtcgagcctggcgctgagggaggtcaaggcgaccagtcgagtggcgattccacagcgcgaataaccgcgcttttcgcggggcgatgtggcaaatcgccgccactgagatgtgaaaaattcgttaactgtttctccctcaaggctttttcctacaagaacaatctgccagactaatgcgaataattatcaacagattttttattcgccagggacggcgttcggggagagtcagttccatgtctgtgcaacaacacggcagtaaaggtttttcacccagtctgatagcgttggcggtctgtctggccagttcatccgcggtctttgccgccgatacccaggcgccggccaccacgcttgaactgggcgccacgcaaatctctggcgaagagcaactgggcgaaaccaccgagggcacccagtcctacaccactggcgcgatgaaaaccgcgaccaaactgccattgaccatgcgcgaaaccccgcaggccgtcaccgtgattacgcgtcagcgcatggatgaccaggcgatgaccagcatcaacgatgtggtcaaggccacgccggggttgttcctgaatttctccagcggtccgggccggcagtcctatacgtcgcgcggcttcgacatcgacaacctgatgtatgacggcatccccagtggctataacggtgtgtcagtgggcgcacagccgaacctggcgatgttcgaccgcgttgaaatcgtgcgcggcgccaccggcctggtcaccggcgcgggcaacccttccgccgccatcaacctggtccgcaagcggccactggacgagcagaaagtcaccctgaccggcgccgccggcagctgggacgactaccggggcgaactcgacgcctccagcccactcaacgacagcggcacctggcgcggtcgcgtggtcacctcgtaccgcgatgccaacagcttcatcgacaacgccgaggagtatcacggcctgttttacgccgtcaccgaagccgacctgagcgaagacaccaccctgacccttggcttctccaaccaaaaggacaagaccaattacttctggggctcgtcgatggtcggccaggatggccatcacctgaacctgccgcgctcctacaaccccggcaccgactgggaaaacaaggaccaggagatcaacaccgtattcgccgagctacgtcagcaactggccaacgactggaaactgcaagtcaacgccaactatgccgaacagaacgcgctgttctccggctcctaccagtcgcgctgggtcgccaacacactggcgcgcaccgtctatcaagcggcctacgatgaaaaccaggcgggtgtcgacgcgtttgccagcggccccttccaggcgttcgggcgtacccacgagctggtggtaggcgccagccggcgcatctacgacatgaccacccacaactacagcccctacaacctgaactggccgctcacggcgggcaaaccgaacttcgtccacaccaccaatgaccgcgacgtgaccacccaggacggggtgtacgtcaccacgcgcctgaatctggctgacccgttgaagctgatcctcggcgggcgcctggactggtatgactacgatgcccacggcagcaacaccggcgactacaaggtcacccgcaacctcacccgctacgccggcctgatctacgacctggacgaccatcactcggtctacgtcagctacagcgacatcttcacgccccagagcgaaaaggacacctccggcaccccgctcaagcctatcgtcggcaagaactatgaggtgggtatcaagggtgaatacctgggtggcgcgctgaacgcgagcgtggcgctgtttcgcgtcgaccaggaaaaccgtgccgtcggcgtgaccgtcgcaaactgcccgcaggcctcctgctccgtggcctccggcgagattcgcagccagggtatcgacttcgaactgcaaggcgccttgaccgagaactggcaggtcggcggtggctacacttatgcacgtacgcacaccatcaaggacgcagccaacccgcagaacgtcaacaagcagttcgacaccgacaccccggagcacctgttcaagctgaccaccaactaccacttccagggctcgctggaaaaactccgcgtgggcggcaacgtgtcctggcagagccgcatgtacaacgacttcaaagtcgcggatggcagcacctaccgcctgcagcaaggcgcctatgccgtcaccgacctgatggccggctaccaggtcaaccagcacctggacctgcagctcaacgccaacaacatcttcgaccgccgttactaccagtccatctccaattccgtgagctatggcggtgattcctatggcagcccgcgcaatatgatgctgacggcaaagtacagcttctgattcacggcggcgccctcctcaaagggcgtcgcacagcgaaccagaacccgaatgccgacctccgcgagcatgaaaatgcgctatgttatcgggctcataccttcaagattgataccatgcacatcacacgcttcgacatcctcccgtacctgacatccacccttggccttgaaaaaaacgagatgagcgacctgggctcgctcgtggtcctggtcggtgaaaatggttgcgggaagtcgcggctgctcgaggcggtcgactggctgctgcgtcgcacacaccaggttgggtacgctcaattgctcaagatcgacgcaggccgggcaaaacaaaagcgccactccgacgctatgctactgggagccgaagaccacatctcatgctcagccgctgcgtcggattgcgaagcgttcgataaggtacttgtgcctcttgactgtttgaacttcagcagtacgggcgacgaagacatcgatgtggcactgtccgcctattgcgcactgtccgacatactgcgcaacccgacgatttcaaaaggggggcacttcacgcgtctgtcggtcggcgcgccgcgcggcgatggcctgacggattcactacttgctggaactccactcgcttacatcgatgacgtctgcgtgcgtcaggctgcggcctcctccgacgaatcgatagggatgtacagcccaaaccgcatgattgaggacgactacgctcgcctgaaagaagtgctcaacgaaatcactggcatgcacttggatgtcattggcgaaaatgcctgcatcggcggtcagcgtattgatcgtacgacgttttctgacgggcagatggcgttgctgcgtattgcagtgctgatccattctcaggtgctgaaggacgttgaactgccgatcctgcttgatgagccggagcgtcatctgcacccttcgcgactcatcggactgatcgacgccctccgtaagcacctgccccgcgcacaattgtggattgcgacccacaatcttgcgctgacagcgcatctggcggccatagagccacgcgcaatctggttcggttcgaaggggctattcgagcgcgccggcctagcgcaggaaaaggtcatcaacggccttctgggaggggcaaccggcgcccaacagatcagcgatttctgcacgcgcgcggaccagttcgcggcatgctcgttctctgcggactgcctctatccacccgataccgtcacctataaaaaagatgatccgcaaatccagcagatccgcgacttcatcaccggagggcgtactcgtcccatggtcatcgtcgacattggtgccggacaggcgcgtttactcgacggtttggctcatttgctcaatgactctttgctaaaggacgtctcttactatgccatcgagccgaacgacgccacgcgggcattgtgtgctgaaagggtcagtcggcacttcaacgacgggagtgtacgcgtgttcgccagcgcaaaagatctcctcgcatccggccctatcaaagccgacgtcgcggtgctggcgaacgtgctgcacgagattgagctcaagtactggaaagcggtgttgctcgatgcgcacacgctcctgaaggacgatggatcgttgctcatcgtcgaggacacacggctgccgcgcggagagctggcccacccgcacggctttcttatcctcgagaccgacgccctgtgcgaactcttcgcaacctgcaaggacgcacacggcgttcagcacattgccgcgacacgcggtggcgcccgactacaagccaccgcgttcaaacgaccgctactggcggcgttgactacctcatccatccggagcgccttgcacctgcaaaaaagtagcgcggcagccagcattcgcgaattgcgtaagtctggccggcaacctgactaccgtctcggtcaagaacatgcctaccacacgcaactgcttgccaacctcacgctcgcccttgaagacttggcattaggtcgctgagccacaccgaaatgaacgcccgaatcctggagacgggcgttcaatgcacattaggatgaggcctgtacctcatctggcccaattcctgcctccctccatcccaccaagtcgctgctgactacgcggacgactcttttgagccccgccgcccaagcgcctgcgccgataatcggtcatcccccagctatcccgaggccttccccccatgacgagcccctccaccgaacaggtcagtccgcaaaccctgcgcaaggtcatcatcgccgccggcatcggtaatttcgtcgagtggtttgacttcgccgtctatggcttcctcgccactactatcgcccagcaattcttccccagcggtgatgccagtgcagccttgctcaagaccttcgccgtgtttgccgtggccttcgccttccggcccctgggcggtattttcttcggcatgctcggcgaccgcatcggccgcaagcgcaccctggccatgaccatcctgttgatggccgctgccaccacgttgatcggcctgctgcccacctacgccgccatcggcgtcacggcgccgattctgctgtcgctgatccgctgtgcccagggcttctccgccggcggtgaatacgccggcgcgtgtgcctatctgatggagcacgcccccagtgacaaacgcgcctggtatggcagctttgtaccggtgtcgacgttttccgcgttcgccgccgccgcggtagtggcgtatgcccttgaagcgtcgttgtccgccgaagccatgggcagttggggctggcgcctgccgttcctgatcgctgcgccactcggcctggtgggcctctacctgcgctggaagctggacgagacgcctgccttccaggccgtgaagcaagagcacgcagtggctcactcgccgctcaaggaaactctgcgcaaccatggtgcggcgatctgttgcctgggcgcttttgtgtcactgacggcgttgtcgttttatatgttcaccacctatttcgcgacgtacctgcaagtggcgggcgggctgaatcgggcgatggcgctgctggtgtcgctgatcgcgttgatcttcgcggcggcgatctgcccgctggcggggctgtattcggaccgggtcgggcggcgtgtcaccgtgatgactgcctgtgtgttgttgatcgtggtggtgtatccgtcgttcctgatggccagctccggctcgtttgcggcgtcgattgtcggcgtgatgttgctggcggtcggcgcggtgttgtgcggcgtggtcacggcagccttgctgtcggagacctttcccacacgcacgcgctacaccgcttcggcgatcacctacaacatggcatatacgatcttcggcggcactgcgccgctggtggcgacctggttgatcagcaccaccggcagcaacctgtcgccggcgttttacctgattgccgtggcgttgctggcactggccggagggttggcgttgccggagacgtcgcggatttccttgcacgacgtgggtggtgaggaaacaagcactgcacctttgctttcacggtaaacggcaggagggtgaacgccgctggacgcaggtagaatcaattagacacctgcctgctgccgcatccagaccatggacagcgttttctgaaggcgccgcagtgaaccctgtggtgcgcatcggctaaatcgccgcagccatgcgcgctctagaaccccaggcaaacgtcacgaccatcagcaaccccaagcccgccatcgccgcgccggccagggaaatcgccgggtagcccaaccctgcgttgatcactgcaccccccactgctgcgccaatcgcgttgccgaagttgaaggcgccgatgttcacggccgaggccaggttcggcgcatctttggccgcttccatcacacgcatctgcaacggcggcacgacggcgaagctggcgataccccagatgaggatgctcaccgctgccggtatcggccaacgcatcaggaatgcaaaggccagcaggaccagaatcagtgcgctcagcgagacgatcagggtccggtcgatcgagcgatctgccgccttgccaccccatatattgcccagggtcaacccgacgccgaacagcaccagcatggccgtgataaagggggtagacgcatgggtctggttgctcaggatcggcgcgatgtaggtaaacacggtgaacatggcaccggaacccaccacggtcagggccagtgccgccagtaccgaaccacgccccagcaccttgatttcggccagcacaccgtcgcttttcggcagcggcaggtcaggcagcgcgaaccacagcgcgaccatggtcaccaggcccagcccgccaatgccccagaacgctgtacgccagccaagcagttcacccaaccaggtcgccagtggcacgccaccaatagtcgccagggtcaggcccataaacatcgcggcgacggcgccggcgcgcttgtccggcgcaaccacactggccgcaacgatggaacccacaccaaaaaacgcgccgtggttgagcgaagtgatgacgcgggcaatcaacaggtcgtaatagccggttgcaagcgccgacatcacgttacccagggtgaaaatggccataagcccgaccagcaagtgacgacggggaatcttgccagtggtcaggatcatcagtggcgcaccgagcaatacccccagggcgtaggcgctgaccaacagccccgcagtgggaatcgaaacgccaaggtcattggcgatggtgggcaacatgcccatgggcgcgaactcagtgacgccaatgccaaaggcaccgacagccagggctacaaggggtggattgatacgcatggaagactcctcatttatgccgcaaatgctacgatcaacgctttaacggcactagaccgtttaattggcaatcacctttgcgcgcgaggcaaaaatggatttcaacggcaggtcgggtgagatggcggtattcgcaatggtggcgcaggaaggcagcctgtcggccgcagcgcgggcattacgcttgacgccctcggccgtcagccgcgtcatcgcacgcacagaacaacgcctgggcacccgcctgttgattcgcacgacccgcgccctcgccttcacagccgaaggcgaggcgtacctgcgcggcgcccggcgcatcctggccgacatggcggaagtcgaagaagccatcgccgaccagggcgcgcccaaaggccggctacgggtcagtgcggccctgggccacggccgcatggccatcgtgccgttggtggcggcgttcagcgcccgctacccaaacattgtggtggacctgaccttgggcgacgaagtggtcgatatcctcggcggccaggctgacatcgcgatccgctttggcgacctgccagacagcccgctgaccgcgcggcgcatcggcgacactggccaggtcctggtggcgtcgccggagtacctcgcgcaacacggtacacctctggaacccaacgacttgctgcgccacaactgcctgcgcttcaacttccgccgcgcccaatccgactggcccttcgcccgtgacggtagggagttttccctgaagataaacggcaatatcgaatgcagcagtggcgaagccctcgctcaactggcgcgattaggcgccggtattgcacgtatcggcgagttcacggttgcacaagacctgcaacgcggtgacctggtgcgcctgctggaatcctggaaccccggcgaccgggagccgatccacgtggtgtttgtcggcggcgcgagcatgccggcgcggatccgcgtgtttgtggactttttgctggagcatcaccggctataaacgcgcaggcttgtgcagccgctcaagcacctcgtcagctgcctcgcgccatgcctgcgtcgcgcctttgttcctcaacaccgccaacccagccgccgtaaaggtgcccggtgtcgcaatcgcgctacccaacgcttccagactcgcggatggctggtggcgggcactggccagacagtcttgcaggttgcccatcaccagttgggcggcctggtccttggacaggcctttgtcggtaaaccactgctgaagatcgctcaggaagaaatagaaccagccgttcatgcaggccgcaacagtggccagttcgaacgcctcttcctcgtccaatacaaccaatgaaccgagcgcgcccagcagcgttgcatggggttcgccaccgggcgtgaccaccacggtcgtctggttgatctgcgcggcgtaggacagcatggcgcgcaccacacgcgcttgcgggaagcggcgctgcaactcggccagcttcaatcctgccaccaacgacaccagcgattgctcaggtctgagctgcacttcattcgaaagctgatcgaccacctccgggcgcacgcccaggaccaacaagtccgccccatcgaccacctgttgattgtcagccatcacctcacagtcccactgttcagcgagttgctgcgcacgttggtggttacgcggagacagcagcacccgcccgccaaacccgctgcgccgcaggccgatcaccaccttttccgtcagctcaccgacgcccaggattccaatcttcagcacgctgtccactccggtcagttctgtagtcgggtgcatcatagacatgattcccgtcttcatgcaggcggacgttcacgctacactcgccgctcgaaaagatcagccaggaaggcaagcatgagcactcaaggtaaagaccggcaaatcgacaacatcgaattcaacgtcagcgatattgcccgcagcaaagccttctacggcggcgcgttcagttggacgtttgtcgactacggccccacctacacggggttcagcgatgggcgcctgacaggcgggttcaccacgggggagcctgttcggccaggtgggcctctggtcattttgtacgccgatgacctcaatgccacgcagcagcggcttaaagccctgggggctgtcattacccgcgagacgtttgcgtttcccggtggacgcagattccacttcacagacccggatggctatgaactggcagtttggaacgccggtcaataggcctcgacccgacgcctaggcgaaggcatcaatcgctctccctcaagccctaccctcacaggatatgaaggttacccatgcgttttctctttcccctggccctcagcctgacgcttatcggctgcgccaccactaaaaccgacgttcgcaacgaagcccaaatcagccaatacgacccggccaactcagcccgaatccggtttattacgggtgacaccaccaacgcgggtttcctcagcggccagacgtgcgagatgttttacaacaagtccctgctgacccaaacacccgaagaagccgggtggcaaaaagcccatgtcgactcggcggggctctacccgttcagggccactgacagccagaacagcgtgattggtatgcctgccagcaaggcgagcaaagccatcaaccaatcgcccaaagtgtttgacgagcatgtcattccagcgggtaaaccctttattgcagggttcgccatgggcggttcgcaaatgtcctgctttcccgcgcctgtcacgcttattcccgagcccggcaaagactatgaaatggaatttcagctggtcaaaatcagcacgttcaaggccggttgcgtgattgccgttcgccaactctctgttcaggacaacaacacggttgaaacaccgctaaggccgcaggtgtgtgccaaaacgccgtcgggttggtacaccgtcaccccgaaaccttcgccctgaaatgcctgggcaggacgccatagtcatcctgcttatcggacatcgcccagacctgggacccggcttgtattggaggaaaaatgcggatctacatcacaggtgcatcgtgcgcgggcgtcaccacactgggtcaccacctcgccacgcggctgggtatacgacgagtcgacgtcgatgacttttactggatgcccacaaacccgcctttcacaaccaagcgacctcccagcgaccgcgttgccctgatgcaacaagcactcggtgacgacgactgggtgctgagtggttcctgcatgatctggggcgatgcgttgatcgccgatgccgacctgattgtctttgtggtcacacccacgcccgttcgcctcgaacggttgacggcccgcgaaaaggcccgctttggcgatcggatcgcacccggtggtgatatgcatgcgatacacgtggccttccgggaatgggcttcgcactacgacgaccccgatttctcggggcgcaaccgtgggtggcatgaggagtggttatcacacatggcggccccgatcttacggatcgacggggctgacagtgttgaagcaatggttacggcagtcgttcattgggtatcgaaaatgtcgcaatagctggaaaccgtaacagacgaggcagctcaactgcctcgactgttctatttctatccgcccgtttcgcgatgccacaactgtcaattgtattttttgtagcatatatctatggcttgctgataaagcacctgacacgtgtcgtgggtgaataccccatttgaaatacaagcagagtgccgttgacttgcgcgatccgtacaaaccgacagaggcgttggtatatcggcgacttcctcagtaacgccatgtgattttgctgaattcacagggctcatagatttgttgagtgcttgaggtatctgttcaatcgtggggctttgaaagctactcgccaaaaagagaacgattgaagctgcttgccgcgcaggagaattggctggccaaagcttgaaatccaggagtacatcaccttgcttaagcgcgccatctttggtccaacgaataggtactcctgagccattttcgagggtacctttcgagtcgatgctaaccattggcgccccggctgagtcctccaaaatggacgtagcgcgcaagaccgccaacaaccttcctgaggtatcaacgactcgcccatcctggcttatcgttcccaaggctgttcgcacgtatttgaaaccttctgttttttcgtactcagtaatctccccttttttgtcgaccaatatgaaaaacataccgtgcttatctccaaccttgaaaggatggatctgaacgaccggtggggcgaacgatttgttatcgcaaccatgcgggccgggatcacactcaggaggtcttgcaaagcagaaaccacttgcaaacatcaacaagctcattgcgattgcggtgagcgttttcatgtgaaaattccttttaagcactgcgtaccggacgattaagtgtgttggccacgcggagaggtccagctttgccagacgcctcgttgtagtcgacaactcagctttacatcttcgataaggcgaattgaacaatagacgacgttggttgacgctgacgcgaatttttcatggtttcctatttcggtatatcgacgctgagagtctcaatctgcacacgtcaaccgcctgatacattgcgggcccaacgcaccggtcgtccaagcgtcgctactccccttatcctcacccctacccgcccccgcgaacccggagccgccatggacctcgccaccctcgcccttttcctccccgcctgcttcgccctgaacatggcgccgggcccgaacaatttgctctccgtgagcaattccacacgctacggctatcatctcctgtttggcgggcatcggccgcttgctggcctttgccggcatgatcgccctcgcatccgccgggttggcggtggtgctgcaaacgtcggagttgttgttctatgggatcaagattctgggggcggcgtatctgttttatctggcgtttcagttgtggcgggctaatccggaggcggaggcagattcggccacagagaaggtgggattgtgggcgttggcacgacaggagtttttggtgaccgcgggcaagcctcatgatcggtaatatgaaatctacacgcaggcatatatcggtcatttggtattaataaaagcagggatgaatctttggatattaaagagttttgcctcgctcatggattcgatatgagcaaatgtggggtagcgttgggcggtggtagtttcgaaatgactgagttgaaaatctcaccagtcgaatttctgaccttagcggaggatgattttgaacggggcggtttggcggctcttgtcaatgctacgaccaatgcaaaacgagctattgtctctcagcttgatcagttattgatctcttttggctatccttcatttcgattgaaggtgccaaagaagatcgaacggctaaaggcgctcgggttattggcgccaagtctgttgcgtaaagtcgtcgatatgcgaaatattcttgagcacgagtacacaacgcctgggcttaaaaatgttgaagaggcgttggatatcgcgagcctatttgtgatgtccgcttcagccatgttcattccattcgatgatgtcttggagttctcactccctgacctctttgtgacagagaacgctgtcactcacttttcggcgggactgaatcgtgagactgatagagttttctacactgtctacgcttataaatctggaagccatggacggagttgcgtcggtcagtgtgagattcaatcagggcatgtcctgttcgaggcgatggtgcagctttccgcgtcgctgatgcttcgctacaaggtgaaccaagctctcggcaattttgaagcggcgtatgcccagctataagtactcatttaattaatgttgtggctgtaaacggctgtaacccaccgaaaagggcgcgtccaagctggtggcatcaagcaacgttcaagcaaatctgctgatgggcaatatcacgtctcgtgaaagactcgatatctctacaaacccagcgaaattaaggtaagttcagaaaaccttttctcgaatctacggagcggataatggcgaatggaaacggagagttaagtcaggatttacacgcgcaaataaagaaattcagcggtgacggagatctgctggctgagtcaggccgctttgaagaagcgctagcccaatataacaatgcatgggcattgatcccctcccccaaaaatgattgggaggctgcaacctggatcctggcagctatcgctgacgcttgcttcctatctggatttaccacctcagcacgtgaggctttgcagtacgcaatgacgtgccctggtggtcttgggaacccttttttgcatctgcgccttggacaagttttacttgatgacgcacaaaatgaccgcgcagcagaagaactgatgcgtgcatacatgggggctggcccagagattttcgctgcagaggacgcccattacctgaactttctcaagacgcgtgctgatctttgacaataccgtaaccatgagctcctgcgtttacattcaagctactcagccccctaacgtgaatgcattgggtcgattaaagtcgtgcggtaggcaagccattcaagctagtcaccagcaagcccgataatgggcaatatgaaaccttctgtcaggctgctaccggccagaaccggttacctgtgcacgattgatgctctgtgtccgtcaacagcatctattcgatactaaccactctcgtagaatctaaatggccaccaaacgccctcaaatcaaaacctccgctgacattaacgagctgctgcttcactctaaggcgccgcggccactgacccctgagcagatggcggagctagagcgcatttcgaattacgatgtctctacctactcggagggagacgtccgagcggagatcattgaccccgtcatccgagtcctgggctatgccaaagagacctatttctccacgcagcgagaaaagcacctgaaggttggcgacggggacttgttcatcgactatcgaatgactttgtggtcgcaggccttttggatcatcgaagctaagaaggttaaacgcaagcagctgaaatttagctccgcagaactgcaacaggcacttctgtatgcggtgcatccggaaatcgacgctgctctcgttgtgctatgtgacggacgagtctttgaggtgtacgaccgcgatgagagtgtcacccagccagtcgcgcgcgtggaggtcaaaaagctaccggagcagttccacgtgcttcaggctctactcggtccgtggcaggcttggttcttccagaagcgccgcgcgctcaagctggccagccgtgtcctacagctggagatgacgcctggccgaattgaggagttttcggatgcaatgcagcggcgggtgcaggacgcgcgtgcgaaggtgtacgacaattggcgcaaggtaaagccctcaactgacaaagatgcgcgatggctcaactcgctggaacaggcatctatcggagatattgtcgcgaccgagttcttttcgggccagacagcgcaccgtctgggggttgtcgccaagtcgttggtggaaaaggcgaagccaggcgcgttcgaattgatgtacgcaatgtttccggaccatccaggaaacttgaacgacaactatgtggcacaggctttacgaactctcatcgagttcggcaagtcgggacgtgaggtcagttggatgcctgcttggcttggtgtccaacagcccggtgtcaatctggaggcgccgatcaagaaacttatcgcgctctcacttacgacctttctagctgcgccagatttcagggctgtacttcagttttcggcctgcgcgcgaaggctgtcgaaggtttcgatggcgctcaacccgacgttatcgaagttggggcatatccaacaccagcaggtgcgccatttttttgatgaactccactatgcgcagttcatgtcgacgcccgaagggcataacctccggcagctcgatgtgcgcgcatatctgctcaccgaacgattcgtccatgagtgcaccggcaagcagcagtttcgtggctgcttcaacctgaaccgggcacatacgctcctgattgactcatggaatgttgagcgtctgctgctcggcgacggcgccgactactggaggtgcctggacggcagaggaattgggggagaggttcatccgacggagcacaactgggtcgactacgactcgttgggtcacatcgcgctatgcgtgttgaaagacatccctgattggcgcgagtacgtacttgccaatcacggcgacgacgtccagcgaattgcggcctgcggttcgtgggcagctcgtgagattttggggattgcacgagatacgcagttaccgcatgtgccggatactgagagcgccaagcggttcttcgatggcgacgtctcgctcttcacggcgcttcgggacgcttactgcaatcgggggccggagagttgagtagcaaagcttcggccgtccccgctcctcttacaaccttccagttgccccccaaacccaatgacgcttatagtccgccccgtcgcccacatggcgatcaggtttggcgacctgactatcggatgcaaaagcactgcgctttttgtagaggctgttgcacgcctgcaaagctgtcttaatggcggctgtgcgcgggagaccttcgggtctgccgggttttccgataccggttcgccaacctgcgtacagctgtcaccctatcgtttggcgacgactgagtggcggtcaactactgcacttatcggagttttcaagatggaacgatacatccctctgactggaatcgatctggttcccgcctctttgctcattgattcagaagcgccgctcgatgtgctgcaagcgatggcggattaccgcatccgcaccgtgactcaagtactggaaaacattgcctttcgcagcgagttggaaacagattccgtagtgctttctgactttgcacaattgctggcaatccctttgcgtgacggctgcgacctgatggacatcatcggtcaacggctgcgcgccgaggtttcaacccccaaagaagcacctgcaagccagagctaagctgagccgcgcgcgttggtgtcgtcttagacccaacgcgcgcattgtccaaccgccccgctccccttatcctcacacctccccgcccccgcgaacccggagccgccatggacctcgccaccctcgcccttttcctccccgcctgcttcgccctgaacatggcgccgggcccgaacaacctgctgtccgtgagcaactccacccgctacggctaccgcacgtcatgcctggcgggcattggccgcctgctggccttcgccggcatgatcgccctcgcctccgcagggttggcagtggtgctgcaaacgtcggagttgttgttctacgggatcaagattctgggggcagcgtatctgttttatctggcgtttcagttgtggcgggctaatccggaagcggaggctgagtccgcgacggccaaggtgggattgtgggcgttggcgcggcaggagtttttggtggcagcgggtaatccgaaggcgatcttgatcttcaccgccttcctgccgcaattcgtggtgcccggggagccgatcaccccgcaattcgcgctgttgggcgcgatgttcctggtgctggagtggattgccatcagcgcctatgcctatatgggcctgcatatgcgccgctggtttgccgagccacggggcaagcggatcttcaatcgctgctgcgccgggttgttgtcggcggcggcgtcagtgttgttgatggcgcgcagggcttgaatggaagaaagctaattttgcaaatcgaatcttggctgcacgcacaagcatccacggtcttggagacctaaatatccgtttactaagtcgtgccagtaatattttacgcgccatgcattgcctaatgtattttaccttcctcagaaactgccagactgaaatcagtcaatataaaaagacttcccgacgagaacaaccatgagcaaaaatcatttcatcaagatgtttgaagcaaaatttaactatttatggagccttttcatcgccactgacacaataaagcataatggggaaaaagggagcctaagagaggcatttgtaaggcagattatagaatcacttctgccacaccacttcgccatagggagcggtatcatcaccgacttcaacggaaaagagagttcacaggcagacataataatttacgacaaaagattgatcccacccatattccaagatatcggccgtggaatttacccaattgattccgtactaagggtcttggaaataaagagcaacctagacaaaaagtcattaatccaaattaaagacgcttcttggaaattaaacccatcaaacccagacggattgaaaattgcaaacagcggaaatttaccaggtggacagatgaactatccgctatatggtgtttttgcatacaaatgcagtatctccaatttaaataaaacgcttagcagtcttggagcggcaacgccttttcccaccatggcgatattaggcaaaggtgtttgcctcaataaatcaaatacacttactaccgttgaaagcaactcggagctgactcgcttctttatgagcttgtacttagagtgcattgaagaagaagcagcctcacgccaccacttcggcctaataagctggctggggaaaagctttttcactatgcagcccacggctacatagcccacacaatcccccccctaaacctccgaagatttttaaaaacatagaagatagcgttcgaaaagttatacgcgaatacggataattttttactatttgaaatagcatgtgcgtttcatgcaagtttcaatactattttttaaaccaattactctaccgccctttctaggagagatgtcatgaaaaccatcgtggtcggtgcaagcaaagggttgggcaaagccctgatcgaagggctcggcgagccgggggatacgctgatcggtgtgtctcgctcccgcccggaacagctggcccacaaggccggcgtcgaggtgcaatggatcgaagccaacctcgcgaaaccaacccaggcggcgcaaatcattgccgaggcggtggcaggaaacggcctggacacgttgatctacaacctgggcatctgggaagaattcgccttcgacccggcctacaacttcctggccgacgacgatgaccagatcgaagccatcgtcacctgcaacatcacctccaccctgctgctgatcaagcgcctgttgccggtgctgctcaagagcccccaccccaggatcattcttaccggctccacctccggcctgccgcaaagtggtcggccggaagtcgccttcggcgcctccaagttcgccttgcgcgggatcgccgatgccctgcgtgaaggttatcgccggcagcgcctggcggtaacctgcctgaacctgggttatctcaacaccgaagatcccttgagcaccccacgtgcacaggccgagcaaagggatgaaggccattcgattcccgtgcacgatgtggtgcaggtggtacgcatggcgctgagcctgtcttcggccagcttcgtcaaggaaatcaccttgccggcgatactggacgagcgcttttaacaccgggagagcacggcatgacccgcgatgaactcgccaccttctaccaaggctatatcgactgcctcaaccgccaggactgggaccacctgggtcatttcgtgcacccgaacgtgacctacaacggcgaagtcgtcggcctcaccggctaccgagccatgctggagcgggattttcgcgagataccggacctggtgttccgcatccagctgctggtggccgatccgccgaccgtggccagtcgcctgaacttcaaggtcacgcccaggggcgagttcttcgggttgccgatcaatgggcgccaggtgaggttcgacgaaaatgtgatctatgagctggtcgacggcacattcgcccacgtctggtcggtaatcgacaaagcggccatcgcgcaacaactgggcgactagactccacagacccattctcacgtggagaccgatcatgacccacaaaaacaccctttgcctctggtacaacggcacagcccttgaggctgcgaccttctatgcccagacctttccggacagccgggtgaatgccgtgcacctggcgcccggcgattacccgtcgggcaaacagggcgacgtattgaccgtggactttaccgtcttgggcatcccctgtatcggcctcaacggcgggccgatcttcccacataccgaggcgttttcgtttcaggtggccactgatgaccaggccgagacggatcgttactggaacgccatcgtcggtaacggtggccaggaaagcgactgcggctggtgcaaggacaagtggggggtatcgtggcagatcagcccacgcgtgctgacggacgcggtgacccaccccgaccctgcgacggccaagcgcgcgtttgacgcgatgatgaccatgagaaagatcgacatcgccgcgattgaggcggcgatagcggcggactaaggcagagcatccagcatggcgttggccgccagggcatggaccttgcgggtggggtgccattcgtcccagtaataatgcgcgtcggggttggcacacatcggtttagcctccgggtaagtagcctggcatggcgtgtcgaggtcggtgaaaccatgggccgccggattggcgcgcaatgcgtcgctgaaagccaggtggtcgaagtagctgacctttgccgtgccgatctgcgccagcacggccgggagtttctgcgcgagcaactgctggtattttttcgcgttggcgacttggttgccctggaccaccgcaggcacatggctgaggtctgtggtgcccaccaccatcacatgccgggcacccgctgccaccagttgctcagtggctttgcgaatattcgtcaggctcgattcgctcagtgcctcaagggtttccgtgtgggagaagtcggcccactcgaaaaagtcattggccgagatgaagatgaagtacagcgccttggggtcggcgttgtgggacttggcagcctgcaagtgctcggcgatctgccctaggacaccggtgtcctgggagggcatcatccaggtgtagtaattgccgtggccacttttggcgccccccaccgcgtagtcggtcagcggtgtgcgcagggcctgagccaggccttcgacggcggtcgagccgttgctccagcgccccctccagtacagcggcccaggcaacacctgggcctccttgatcttctgtgcagcgagccgtgtggtgagcgcttcgcccgcgccgttgtcggagtagctgtcaccaaaggcatacacgtgatcataggtcgaggcgccgaaggcggttgaagcggacagggtcagcagagcagccaaacacgcacgtcggatcatcgcgtttctcccggaatgtctgcacagactaccggttggcgggagccatgctggaaccattgcgacccgtacatatccagcggcggctatacagcggccatcctgctggttaggcttggcacctgcaacatccagttaaagttccagcgtcacccgccgtcacccttaaatccccgaatggactcaacgaggctctcgtgcgttttatcactccccttttgctgatcggtggcatcgccaccctggccggttgtgccacccagaaaacccaagtcgaaaccatgctggccggcgccctggcccagcccctggttgaaaacagtatcgtgcgcgaaggcgacgtgctcagcttcgaactgttgatgcctggcgatccaggcgctctgcgccgcacgttgcaagtcgaggccgcctgttcttcgccgcaactgcacttgctgtatctggacggttcgcaacgggtctaccccgccagtgccggtcgctacagttcgccccgcagcttgtcgccgcagttgcgtgcaaccctagccgccaaccagaccttcgtccgcgcctgtgccgaaacacccaagccggactggcgcctggtacagaccaacgagcgcgacaaccaggtgctgatcgacgccaacagtatcaagagcgtcaacggcgaaacgcgcttctgggccgccttcgataacccgacggtgctcaacgacctgccctacaacgccccctatgcgcaaaaacgcgagcactttgcggtgtcgtgcacaggcggcacctacaagcagttggccggctacgacatggacgccaacaaccgcgtcagcgacggccgggtcgacagtttccccacgccgcagaacatcgctggcagcaatgccgactacgaattgctgttcaacaaagtctgcgtcagcccggaaaagatcgctgcactgcccgcgttcaagccgcgcatgaaagcgccggccaccattgccctgacctcggtgcagccggcggtgctggcggccatcgcccagttgaacctggacaaacccacccgctcgttcaaatacgtccagttcgcgggcaccagcaactaccgtggcaagaccagcgataaccaaagcacgcagttcatcagccaggacgcgccgagcgggcaactggccctggccacccgtggcgacggctatgagagccaggccgtgagctggcgcaacctgttccacctggtgtcgaaagccacctacggcggttcgggcatggcggaaagctcgaccctgacccaactgagcttcaccggtaactggaaggcgctgcccgtgggcgagaccgtcacctacaccaccgcacgctccagcctcaacagcctgatcggcagcagcaccaacacgcagaccaaccgctgccaggtcgagcgtgaactgccggccagcgaactcaacgcgaaactggcgggcagcgccaaggcgttgtcctgccgcaccgacgacgacaagtacaagcgcgtcagccacctgtacttcctgaccgactacgcttacttctttgaatcgagcaccgacaagaacgagtttttctactccgactcgcgtatcgataaattcgaataaggcccgttgacacactctgcaatattccatgaagatggaggccttgttcagggtgtgtcagcttatgtccgcaatgccttccgttaaccgttccgtcattggcttgattgccaaggcgcaaggttgcgttgcgcacgccctcaaatcgaagaaacagtcgctcatgtgaccggggcgcgctgtcccgtcagatgagctgacaggacattgagcgcgacggtctactctcccttgcaccattccctctgcccttctgacggtgactcaagcggtcaatcatcaggagaaagtgcatgtcatcgtttcaaggtatctgggttcccgtggtcacgccgttccatgacggcgccatcgactttatcggcctgcgccggctggtcaaccacctgctggaaaagcatgtggccgggatcatggtgtgcaccaccaccggcgaagccgcgtcgctgagccgcgccgaacaactggcggtgctggatgcggtgttgcagctggtgccagcgcaccgcgtggtgatgggcctggcgggcaacaatcagattgagctgctggacttccagcgtgacatcctgcaacgcccggtggccggtctgctggtgccggcgccgagttacatccgcccgtcccaggccggcctggaagccttcttccgcaccgtggcggatgcctccagcgtgccgatcattctgtacgacattccctaccgcaccggcgccacgtttgagcaggccaccttgctcaacatcgtggcccacgaacgcatcgtggcgatcaaggactgtggcggcaacctgggcaataccctcgcgctgctggccagcggtgaagtggatgtgctgtgtggcgaagacctgcagatcttcaacgcgctgtgcctgggcgcgaccggcgcgattgcggcctcggcgcatgtccatacggaacagttcgtagcgctgtgccagcaggtacgcgacaaccaattggccgacgcgcgggcgaccttcatgcagttggtgccgctgatcaacacactgttcatggagcccaacccggcaccggtcaaagccgccctggccctgcaaggcctgatcggcagcgagttgcgcgcaccgatgcaggcggccagtgcggcggttgtcgcacgcttgaagcaggtgcagaacctgcccggctaatgcgccaaaaacagacagccagcggaccgtccggttgcgaccggaccgatcccggcctatcgtcgaacccacgctttgccttttgctgtccaacccatccgtattcaggtgacgacatgcccacgctgccccgccccgccgtgctcgaactgatcggcaacacgccgctggttcgggtcagccggttcgataccggcccttgcacgctgtttctcaaactcgaatcccagaaccccggtggctccatcaaggaccgcatcggcctggccatgatcgacgccgccgaacgcgacgggcgcctgcgccccggtggcaccattatcgaagccaccgccggcaacaccggcctgggcctggcgctggtcggccgggccaagggctaccgggtggtgttggtggtgcccgacaagatgtccacggagaaagtgctgcacctcagggccatgggcgccgaggtgcatatcacccgctccgatgtgggcaaaggccaccccgagtattaccaggacgtggccgcacgcctggccagggatattccggattcgttcttcgccgaccagttcaacaacccggccaaccccctggcccacgaaaccagcaccgcgccggaaatctgggcgcagacccaacatgatgtcgacgcgatcgtcgtcggcgtcggctctgccggtaccctcaccggcctgacgcgcttcttcaagcgcgtacaacccgaactggccatggtgctggccgacccggtaggttcggtgatggccgaatacagccgcagtggcaagatggaaacaccgggctcctgggcggtagaaggcattggcgaggacttcattccgtcgattgccgacctatccagcgtgcgtcatgcctactccatcagcgacgaagaaagtttcgaccatgcccggcagttgctcaaggccgaaggcattctcggtggttcctccaccggcaccctgctcgcggccgccctgcgttactgtcgcgaacagaccgagcccaaacgcgtggtgactttcgtctgcgataccggcacgcgttacctgtcgaaggtctacaacgaccaatggatgaacgacgccggcctgttgcactacaaacactacggtgacctgcgcgacctgattgcgcgacgcttcgaagacggccgcgtgatcagcgtgagccccgacgacaccctgctcaccgcgttccagcgcatgcgcctggccgacgtctcacagttgccagtgctggtggacggccagcaactggtcggtgtgatcgacgaatccgacatcctgctcggcctgcaccaggacgccagccacttcaccctgaacgtcgccagcgccatgaccaccaccctgcaaaccctggcccccagcgccagcctcgcgcaattgcaagcggagctggatcgcggcctggtcgccatcattgccgacgcgtcgggcttccatggcctgatcacccgcgtcgacctgctcaaccacctccggagatcccttgcatgagtcagtctgataaaagtgcgtttgccacccgcgtgatccatgccgggcaatctcccgacccgaccaccggcgcgctgatgccgccgatctacgccaactccacctacctgcaagacagccccggcgtgcacaaaggcttcgactacggccgctcccacaaccccacgcggtttgccctggagcgctgcgtggccgacctcgaaggcggcagtcaggcgtttgcctttgcctccgggctggcggcaatttcgacggtgttggagttgctggatgccggcgcccatatcgtctccggcaatgacctgtacggcggcaccttccgcctgttcgacaaagtgcgccaacgcagcgccgggcaccgtttcagctttgtcgacctgagtgacctgtcggcgtttgaagcaagtttgcaggacgacacgcgcatggtctgggtcgaaactccgagcaacccgctgctgagcctcaccgacctcagcgccattgcgcgcctctgccgggatcgcgggatcatctgcgtggccgacaacaccttcgccagcccgtggatccagcgcccgctggagctgggctttgatgtggtggtgcactccaccaccaaatacctcaacggccattccgatgtgatcggcggcattgccatcgtcggcgacaaccccgaactggccgaacgcctgggctttttgcagaactcggtcggcgccatcgccgggcctttcgacgccttcctcaccctgcgtggcgtgaaaaccctggccctgcgcatggagcgccattgcagcaacgccctcgacctggccacctggctggaacaacagccgcaagtggcgcgggtttactacccaggcctcacctcacacccgcagcatgaactggcgcgcaaacaaatgcgtgggtttggcgggatgatctcgattgacctcaacagcgacctggccggcgccaggcgcttcctggaaaacgtcaagatcttcgccctggccgaaagcctcggcggcgtggaaagcctgatcgaacacccggcgatcatgacccacgccagcatcccggcggcgacgcgggcgcagttggggattggtgatgggttggtacggttgtcggtgggggttgaggatgtggaggatctgcgtgccgatttggctcaagccctggcacatatctgaataggttggctcggtctatgtgatgggcgggctcgctgtggcgaactggcttgttgtggcgagcgggcttgccccgcgttgggtggcgaagccgccccaataaaaacgccgcattctttcaggcagaatgcggcgtctggttttagggctgcttcgcagcccaacgcggggcaagcccgctcgccacaacaggcccgctcaccacagcaagccagataggcgtcaagccgaggtgaccttggcccgcgccgcatgcagcttcttgtagctgtcgatcaagcgcagatgccggtccaacccttccagcttcatgctggtcggcgtcaggccataaaagcgcacatcgcccttcaccgagccaatcaccgcatccatccgctcatcgccaaacatgcgacggaagttggcttcgtagtcggccagttccaggtcatcgtccagttccatctccagcaccgcattcatcgcctggtagaacaggccacgctcggcggtgttgtcgttgtattgcaggaacatctccacgcactccttggcctcttcatattgctgcaaggccaggaagatcagcagtttcagctccaggatggtcagttggccccaggcggtgttgtcgtcgaactcgatgccgatcagggtggtgatatcggtgtagtcgtccagttcgctttcgatcaggcgctcgaccaacgcctgcaattcttcctcgttgaggcgatgcaggttgagaatatcctcgcggaaaaacagcgccttgttggtgttgtcccagatcaggtcatccaccgggtagatttccgagtagtccggcacgaggatgcggcaggcggtggcgccgaggtgttcgtacacggccatgtacgactctttgcccatgccttcgagaatgccgaacagggtcgcagcttcctgggcattcgagtctgcgccttcgccggtgaagtcccactcgacgaactcgtaatccgactgggcactgaagaagcgccacgacactacgccgctggagtcgatgaagtgctccacgaagttgttcggctcggtcaccgcctggccttcgaaggttggctgcggcagatcgttcagcccttcaaagctgcggccttgcagcagttcggtaaggctgcgctccagtgccacttccaggcttgggtgcgcgccgaaggaggcaaacacgccgccggtgcgcgggttcatcagggtcacgcacatcaccgggaattcgccgcccagggaggcgtctttgaccaacaccgggaagccctgggcttcgaggccctggatgccggcgaggatgccggggtacttggccagcacctcggccggtacgtccggcaaggcgaattcgccttcaatgatttcacgcttcacggcgcgttcgaagatctccgacaggcactgcacctgggcttcggccagggtgttgccggcgctcatgccgttgctgaggtagaggttttcgatcaggttggacgggaagtacaccacttcgccgtccgactggcgtacgaacggcagcgaaacgatgccgcgcgcttcattgccggagttggtgtcgaacaggtgcgaaccacgcagctcgccgtcgcggttgtagaccttgaggcagtaggcatcgaggatttcgctcggcagttcgtcatcagggcctggctggaaccagcgctcatccgggtaatgcacgaacggcgcactggccagttcctcgccccagaactgatcgttgtagaagaagttgcaattgaggcgctcaatgaactcaccgagtgccgacgccagggcgccctctttggtcgcgcccttgccgttggtaaagcacatcggcgaatgcgcatcgcggatatgcaacgaccagacgttgggcacgatattgcgccacgacgcgatctcgatcttcatgcccaagccggcgaggatgccggacatgttggcgatggtctgttccagcggcaggtccttgccggcgatataggtgccgccctcggacgtcgagttcggcatcagcaaggcctgggcgtcggcgtcgaggttctcgacttcttcgatgacgaattcaggcccggcctgcaccactttcttcacggtgcaacggtcgatggaacgcaaaatgccctggcggtccttctcggaaatatccgcgggtaactcgacctggatcttgaagatctggttgtagcggttctccgggtcgacgatgttgttctgcgacaggcgaatatggtcggtggggatattgcgcgtctggcaatacagcttcacgaagtacgccgcgcacagcgccgacgacgccaggaagtaatcgaatggccccggtgccgagccgtcgcctttgtagcgaatgggctggtcggcaatcaccgtgaagtcatcgaacttggcttcaagccggaggttgtcgagaaagttgaccttgatttccatgggggcacaccagaataacggctaaacaaaaatggccgccattatgaggggtttcactgggaagtttcaggcttttgaccagtggctggcgaattgacccatatggattaaccttttcgcagttggcgccgatggactgagggcaaccagggagtagtcggaatgcgcaataaccagcccgtaacacagcgtgagatttccctcgcgccttcgcaaaaactcatttctgccacggatgtccgaggtgtcatcacttactgcaacgacgcctttgtcgacatcagcggctttgaacgcgccgacctgatcggcgcgccgcagaacatcgtgcgccacccggatgtgccgcctgccgtgttcgcgcacatgtggagtgcgctcaagcagggcctaccgtggatgggcatcgtcaagaaccgctcgaaaaacggcgaccactattgggtcaatgcctacgtcaccccgatcttcgatggcagccaggtggtcggtttcgagtcggtgcgggtcaagtccacggccgatgaaatccgccgggcccaggccctctatcaacgtatcagccaaggtaaaccgggcgtgccgcgccaggacgcctggctaccggccgcgatcaattgcgtgccctacgtggccaccgcagtggccggcagcctcgccggtctgttcctcgacgcgccgctggcaattgccgtggccgtcgccgtcgcggtgccagtgggcgtgctctgctcacgctggcgccaaggcagcaccttgcgcctgttgcagggcgttgagccctcgacgtcggacgccttgatcgcgcagatgtacagcgacgccagcggcccgcaggcacgtttggagaccgcgttccaaagccaggccgcgcgcctgaaaacctgcctcacccgcctgcaggacagtgccgaacaactgagcgccctggccgggcagtccgatcagttggccaccgccagctccaagggcctggaccgccagcgcgtcgaaaccgaacaggtctcggccgccgtcaaccagatggccgccaccacccaggaagtcgccagccacgtccagcgcacggcggatgccacccagcaagccaatgtgctgaccgggcgcggccgtgaagtcgcacgggacacccgtgaggccatcgagcgcttgtccagcgtggtcagcgaaaccggcgcgaccgtggcgcaactggcgcgggacagcgacgaaatcggcagcgtggtggacgtgatcaaggcgattgccgaccagaccaacctgctggccctcaacgccgccatcgaagccgcacgtgccggtgagcaagggcgcggctttgccgtggtcgccgatgaagtgcgccaactggcacagcgcacgtcgcagtccaccacccagatccacgcgctgattacccagttgcaggcgtcgtccaacaacgccgtgcaaagcatggaaaacggccaacgccaggcccaggaaggcgtggcctgggtgctcgaagccgaccaggcgctggtgggcatcagcgaggcggtgtcgcatatcaccgacatgaccacccagatcgccgccgccaccgaggaacagagcgcggtggccgaagagatcagccgcaacatcaccaccatcgccgaactggccgaccagacgtcgatccaggcccatcaatccacggacctgagcaaggaactgacgaacactgcgtccacccaatatgcgttggttgagcggttcaaccgctgagccgctgctgaatgcctggctagccggtttgttgtggctagccggtgtcctgtggctatccggtgacctgtggcgagcgggcttgccccgcgttgggctgcgnnnnnnnnnnnnnnnnnnnnnnnnnnnnnnnnnnnnnnnnnnnnnnnnnnnnnnnnnnnnnnnnnnncgcagcccaacgcggggcaagcccgctcgccacaacaagcccgctcgccacaccaatctccttcaccacaacatagtatgctgaggctcacctccacccattcacgaagcccacccatgtccatcacggataacctcctcgccttcaccttcgccgccaccctgctgaccctcacacccggcctcgacacagcactggtgctcaggaccgccacggtcgaaggcaagcgccaggcgctgcaagccacgctgggcatcaacgccggctgcctgctgtggggcgctgcggttgccttcggtctgggcgcactgatcgcggtgtcggaagtcgccttcaacctgctcaagtactgcggcgccgcgtacctggcctggctgggtttgaacatgttgctgcgcccacgccgctcattggccagcgccgaggtgcaggtcaagccggccggcaactggtttatcaaaggcatgctgggcaacgtgctcaaccccaaggtggggattttctacgtgtcgttcctgccgcagttcatccctcagggccagccgttggtgctctggacatttggcctggtcagcatccatgtgctgctcggcctggtgtgggcattggtgttaatcggtgccacgcagccgctgtccgggtttctgcgccgggaaaaggtgatccagtggatggaccgcaccactggaatgatcttcatagtgtttgcagcgcggttggcattcagcaggcgctgatccgtatggacagttcaatgtcatcggcaaacggcaccgacacgtagccgttctccggtgcacgtacgtaggccaggtattcagggcagtaatcggtgttgtccgccaccaccagcgcgccgggacgcaggtgcttttctaccaggcccagcacatcgccatacagcgtcttggcgccgtccagcagcaacaaatccacgctgtccggcaggtccctggccagggtgaccagttcatcgccttcgcggatctggatcaggtcactcaccccgccttcgatgaagtgctcgcgcgccagggcgatcttcgaggcttcgaattcgctgccgatcagcacaccgccgccgttgtcacgcagcgcagcggccaggtgcaaggtggacaggccgaacgacgtgccaaactccacaatcgcccgcgccttgctgctgcgcgccagcatgtagagcagcttgccagtgtcccgcgagaccggcagccacaggtccttgagcagcgaatacagcgccacgtattcggtcttgctgtgcatcagccgatcgcgttcctccttggataccgagttcaccaaggggctggtagcggcgctggcttgggtatacagacgttcgatcagggacgccaaaggcgcagtggtcaggctcgacataattgatttccgtagagtggggactaagatgcgactaattcgtcgcattaaaagtatgcgagtgattcccatccttcgctattcgcattcgccctgcttccggagccctgtatgaccagccgccagaccccacgtatttccacgcgcaaacagccgcaacaggcgcgctccaccgagctggtggcggcgattctcgaagcggctgttcaggttttggccaaggaaggcgccacccgtttcaccaccgcacgggtcgcggaaaaggccggcgttagcgtggggtcggtgtaccagtacttccccaacaaggcggcgattctgttccgattgcagagtgatgagtggcagcagaccacccggatgctgcgcaacattctggagaaatacgacgaagcaccgctggatcgcctgcgcaaactggtgcatgcctttatccagtcggaatgcgaagaagcgcagatgcgtggggcattgaacgatgcggcaccgctctatcgcgatgcgccggaagcgctggaagtccgggcggcaagccgggaaacgttcgacgcattcatgctggagttactgccgcaggtctctgagcagacacgcgcgctggcctgcgacttgattcgcacaacgctcagttcggtgggcaaggatttttcttgcagcccgcgcaccgcgcaagaaatcgctgtgtatgccgaggggatggctgatatgtttcgggcgtatgtgaatgcgcttaaccatccctgaagcgtactgccccggcatctacccgctgcgcaatagatgtccagacctatagcagaactaccgcaccttctgaggcgtcagccagccacacagtcaataacaagtcattgactgagcaatggccatatgatatcaaaccagctcatggatatgacacttataacaataatagggatggagcctacatgcagaaaatcatgagaaaaaccttacctcttttatgcatgttcaccgttgcagttcaactatcaggatgttcacaaaacgttgtcattcaaggagcggagacacttggcaatgatgccagcgcctacttgaagtcggataatggttggtcttggggcgggttagagacaaccgtaatcgccgtctacccaaaaacgggaaaaccgctgttagaacaaaactttttcctggactacagcaagataaaaatcgcccctggcctctatgcagttgctttaagagtcaattatggcaatgccatagcatttcctgtggttagggtcgaggccaaacctggcaagacctatctcttcacagccaagcgcgtgatggacggagtagccatcaaagctgagtataaagaaaccaacaccatcgattaaatccaaggacggaaatatgaggcagagttttgcatttctttttttaatgctgctggccgggataaccgggtgtgtgtctcggaatattccattaatcgaagacgacactgaaacctcaactaaggttcgtttcgtttcaccgcgagagatgggttggattaatctataccccgagacagactgcaacaacggcgccctcgtggtggtcgacaattccgttgataactttatagagtcactgcgcgggcactcgccaaaaagaataggaatgatcgactctccagaccccaactctcaagcagcggcagaatactcgttcaaaggcggtcagactctcaatatcggcgttacccccttccctggacgctgccttggcggtctaagctttcccactgaacccggatcgcaatatgaagttgtcctggtgagcaatacatcgaacgggtgcaaattcaaggtcagtaaactcaccctgctcaatggctctccccatcgggagcccatcaacaaaatagctccactgatttgcaagtaacccgtcaagtgaaccggtccttcttccgtagacgctttcaaaggaccgcttctggccgatttctgcctgttgcagcgggcagcaatctggatctgaatcaacgtacaaggaggcgtgaagtgcgcgacaagcagatctgggaactgacagaaagcgatctgcacgctgttggggtatggtgctttccgatggacgattccgttgaagatgaatgtacagtccgaccttgtgttgaggaagtaggcttggcgatgatcgtgcgagctgagttttgcgctgccgatggcacgctctatcttggatacgtgcactggagtctggatgaacatattggccaccgacaacctacgctgttgctcaatgacggcacagcggtctcgttttgggggggcattgttaaaccctcctgggatgaagcctcggatgaggcgaaacggatttctttccctatcacattcaagtctgaaccattgctcgggctcacgccgatggttggctgcctagaagggacgtattacctagatagcaatgaccagatttcttgcctttcgataggtgaaaggtgaggacaatagctactctaatctgactttcaccagtgcctgaatgcggcaaataaaacgacgcgtgtcgatcggttctggccgttttcagcccatcactccagattgcgcagaatcaagcgacattggaaatgccccttttctagtgtgttctcaacgcattcgccagccgcaccatcgccgtttcgatctcatgagcagtcaaggacgcataccccaacagccaaccctgtgtcttcttatcgccagcgtacaaccggctcagcccagaaagctgcacattcgcgctcgccgcctggcgaatggttttttcttccgaccaaccctcggcaagcagacaagggatctgcagcccgccttgggggcgcagcgcggtgactatcccatccaggtgcttgccaatcgcatcgagtgtggcggttcggcgtgcagcatagagtttgcgcatggcgcggacatgggcgttgtaatggccatcttccataaagcgcgccagtgtcagttgcaagacttgcggtgtgtggccatccatgatgctgcgcgcgtaagtaaaggtcttgaccaactcatggggcagtatcatgtagcccattcgcagccccgggtagagcgtcttgctgaaggtgcccaggtagatcgtgcgccggtgcttgtccaggccttgcacgcaggcggtcggatgcccgtcgtagtgaaactcgctgtcgtagtcgtcttcgatgatccacctgccctgctccgccgcccagttgatcagctctagtcggcgctccagcggcaacgtcgctcccgtggggtattgatgagacggtgtgacatacacgcagttggcaccgctacgatccgcccgcagcaattgcgtgcggatgcccagttcatcgacgtcaatgccgacgaccttggcttgcgccgcttcaaaggctttcctggcaccgaaatagcccggattttccagcaggatcgattgaccggcgtccaccagtaacaacgcacacaggaacagcgcctggcgcgtactgctcaacaccaggatctggtccggggagcactgggccccgcgctcaaggttcaagtaggtggcgatggccttgcgcagcggcgcggcgccctgggggtcgccatgcagtaacacgttggcgcgatggtccttcatgacctggcgttgcaggcgctcccacacgtcgatggggaaggtgcgggtttccggcaggccggtggcaaacgcagtgaccgcctgctggtcagtgacgccaccactgttgaaaatcatccgcccgcgcaggctcaatcccgcccttggcacctcctcccggtggttcatgtcttggggtttgctacgcctgcgtgctgcgccatgcagttgggtgccaagcgcgtcgcacacgtagctgcccgccccctcacgccgcacgatgaagccatcgcgatgcaattgcacataagcgttctccaccgtgtcgcgcgcaacgccgagtgacttcgccaaggtccgggtagaaggtaacttcagaccgggatcaagggcgccatcgaggatcaacgcccgcagcgcgcgctgaatccgatggttcagatccaacagcttgagctcggcatcgtcgagtcgcattttcagcgtatccaactcgaaggtttttgccatgtggtctggttgactccgcaaaagtgtaggggcgaaacataccatttcaagcctataaatggcgcctccaccaagcacctgactttgcaaggagcaaagcaacatggcctcttccaacgcccactcgcccattcaactacgcgaccttttccacccgattgtcgcagggttggtttcggtcatcgtcaactatggcggcacgttcattctgattttccaggccgccaaggtcgccgggctgagccctgagctgacggcttcgtgggtgtggtcggtgtccatcggcgtgggcattaccgggctcactctcagctggctgacccgtgagccgatcattaccgcctggtcgacacctgcggcggcgtttctggtggtcgcactcgggaccaccccctatgccgaagcgattggggcgtacatcctttccgcggccgccttcgtgctgctgggtttgtcagggcagttcgaaaaagtcatccgcctgattccccctggcgtggccgcagggttgttggccggtatcctgctgaaattcggtatcggcgcgttcggcggcatgagcgtcgacccggtattggtcgggctgctgattaccgcttacgtggtactcaagcgctttaccgcacgctacgcggtggtgggcattctggtgctggggatgggttttttgctgacccaggggcgcgtggatttttcggggctggcgttgcagttcgcggtcccggtcttcacccagcctgagttctcgttgaatgccctgctcagtgtcgcgctgccgttgttcctgatcaccctgacgggccagtacatgccaggcatgctggtgcttcgcaacgatggcttcagcaccagcgccaatcctgtgttgaccgtgaccgggctgggctcattgctcatggcgcccttcggttcccacgcgtttaacctcgcggcgattacggccgccatttgcaccggcaaggaagctgcgcaagatccgtccaagcgctggatcgccggggttgcagcgggcgtgtgctacctcgtgatcgggattttcggggtcacccttgcagcggtgttcatggtgctcccggcaacgttcatcacgaccctggccggcctggccttgctgggcgcgatcggcgccagcatcgccagcgccatggctgacagtcaatcccgcgaagcgtcactgatcaccttcctggcctgcgccgccaacatcacggtgtttggcatcggtggggcgttctggggattgttgattggcctgggggggtacgccgtactcaacgggcgctggtcgcggcgtgagtcggtggtcggttctgccgtcaaacctgttgtaaggactgaggatgccgccaactgatgcaggtgcctggtgcaaagtgatcgccagctaggtcgtcggctcctcggcaccagacggcgcccgataacagcctggcgcctgtctgtgcaacgaaggccagccttgcgtgtagcgagccatacactcactacacgtccagaagatagcccccttcagagcatggctttattgataaataaattgatacccaacgatgtaagaaccgatcttgttagcgtgggccgttacccgcaccgccgtcatgccccgctgtatctgatcattcaaatccgctttattcgtgcacagttgaatccagcgctcggtagtcacatccttgatccacacgccggcctcacaacggctcagctttcccaacgcgggccctgggaaagagatttcataggctgactcatagtgaatggtatctcccggcaataaataagcagcgacatcatacccttgtatggagcaagcaaaaccgacgcaaaaccagccgaaaaaagcgtccatggcgctttttagtgttctcccgcccccgccacgcaagacgcccctgcaagcgaaaaccagtccaacgacacaaccgatagcgatataggtcgtccactcagggatcgacggcatcaaaacggtccgcaggccgatacgcgacgcccagagcatataaacgatccaccccccaagcagcgcaaacgcgaccaacgtgatcgcgatctttcttgatctgttttcgaacgaagggtatttcacttcttgactactcaatgactgacctcagggtgtactccgtatgatgcagcaaaaaccaaccgatacctgacttcttccagtgttgcaccgcccctcacgaggttgcgctcagtgcctggctccgcgacacagcccgcccggcgataaaaccgtatagctcgttcattaaggctcaacacccaaagcgtcagaccctgatagccctgctcgctcagatactcaacgccggccgtccacaacgccagccccacgcctgtttgccagtacccggccaacacatagatggccatgacctcaccggtgttggcacccgcagcctcctcgtcacggctggcaccgaccgatatccaaccgaccacctgtccgtccacctccgcgacccaaaccttgggctcgtccgactcaatcgagtgcatccagaaggattcacgctgcgccagggtcgcttgcaacccgctcaaatactcggcaggcatcaggttacggtaggcgtcctgccaactgctgatatgcacttgggcaatggcccttgcgtcgtcgggtaatgccttgcggatcatgtcggtattcctttttcgagcattggccttccagtaaacccacgccttatgaccgtttatattcgccggggggcgaggtggctatccggcttcgaacaaatcgctgtctgggcgcacacattggctgatatgttacgagcctcacgagcaaagggatgcgccatgccaacgttagccagcaacgccgcactgctgatcatcgacatgcagcaaggcatgaaccagccgaagctgggacgccgcaacaaccccagtgccgaagcgcagatacagcgcctgctgcaggcgtggcggcagtctaagcgcccggtggtgcacatccgccacatatcccgctcgcccgactcggtgttctggccgggccaaccgggttgcgagttccagccggcgctgcaaccgctggcgcatgaacatgtggtggagaagaacgtcccggatgccttcacagccacgggtctggagcgctggttgcatgcgcgcgggatccaccaactggtgatcgtcggcgtgatcaccaacaactcggtcgagtccacggcacgttcgggcggcaacctggggtttgaggtgacggtggttgccgacgcctgctacaccttcgaccagaccgatttgtccgggcgcccgtggccagccgaggatgtgcatgcgctgtcgctgagcaacctggcgatggattatgccaaggttttggagaccactgaaatcctgggtgggttgtgagcatcacgcatgagaccggcaagcgaatcgtggtgattggtgcgggtatcgtcggcgcatccttggcctaccatttggcccactcgggccgccaatcacccacgtggagcttcgccccattcccgtggatggcctccccatcatcggctacctaccaactgtcggtggtgtctacgtgtgcgccatacatccgggggtggtactggcacccgtggtgagccggctggccagtgaagagatcatggacaacaccctcttcgatgcgcttgccccctgccgtcccagtcgattcgttcaagggctgacgcccgcaccctgaagcatttccaagagtccctccggccacaccgtttcttctgttgttcgaagttcagcggcggaccaccagcgatggtcggccatcacctgtgtctcatgcacagtccattcggcttttgacagcgcctcattgggcgcctgaaccacaaaatactgttcgatggccaacactgtttcgccacagggcaacatcaacgtcacgcggcgatcccctacaggcgctgcaacggcctctacctctatgccggtttcttcgcgcagctcacgtatcgcagccgcctcgaaggtttctccggcctcaacacctccgcccggggtcgcccagtaattttgcccggccagtgccccgtctttatgtacgaatctgaacagcagcactgcgtgtgaggggctgatcaccagtagccgtgcggcctttcgctcgcgcattattttatgccttccttgaaacgtgggtttgattacgctatcgcgggctgaccgcgtcaggcgttcaagcgttgtgcgatggccttacgcagctccccatgcgggtcttctgcgtaaggcagcgcattcttccaatcataaaaccacgctggcatccggcgtttatcatccggctccgaggcgtagcgcgggaacaaatggcagtgcagttccggctccgaattgcccaggatctcgtagttcatgcgcagtgcaccggtggcctgcaacaccgcgtcgcccaggcgcgccatgtccagcaggtagagggtacgcgcctcggtatccaggtcattgaggctggcaaccaccgggtccggcaacaacaggcaatagccgggcaggaactgcacatcccccatcaccgcccagcccgaggccatgcggcagatgaccttgtcgttggtgccgttgcgggcctgcgtcacgcgttcggtgataagcgccatgcaaaatccttggtcgagatgaggtccaggcagcatcttaacgcgacctcaagccctggaatcaacccatgcgcattgcctgcataccgcgacccgcaacatcaaccgtgtgcgccctgcaaaacccgctgaaggtaagcgtccagcacatcgatattcgctgacgaaacaatcgcgccgatatacccatcaggccgcaccagcacccactcgccaatcgccagttggtaggcacgttgaaactgaccctgctcgtcaatcacatctccctcaggcccaacgatatggacctgcacgcccggccaagcgggcactgaatcacgcgtgacgctataccccagcagcgtccagtgcgtaccctggaacagatggaacagccgcaacgcctgcccggcggcacctcgcagcagcgcgtccggcgcgcggtcacccgctgcaacgccgttacgcttggggtgctgcaacgccaatgaggactcggggtagccgatgtccagttgatgcacttccctgccccggcgcagttcgccgtgctgcatgtcgcccagcagtctggtggacaaaccgagcacggaggcagccaccggccggcgctcttcttcataggtatcgagtagcgcctcaggggcgccctgcaccaccgccgccagcttccagctgaggttgtaggcgtcctgcacactggtattgaggccctgaccaccggtgggcgggtggatatgcgcggcgtcgcccaccagcagcacccgcccccggcggtagtgatcggccaggcgtgcattcatggtgtaggccgatgaccagctcacgctgtgcacctggatatcggcgcgcccggtgcgttcggcgatcagtgcggtgagcccttcggcgctgaagtcgatgtcgccatcggctgggatcgggccctgaagctggaacagatcggtgccagccagcgggcagatcgcaatctggcgttgcatgtcgccttcgccaaagcggtgccaggcctcacgcgtcaggccggtaagcaccccatccgccaccagtgcacgcacgcccagggtcttgccggggaagccgatagccagcgcaggccggacgaagctgcgaccgccatcggcgcccaccagccagcgcgcacgcaggctcgcttcgccgcccttgccggccagcctggcagtgacaccgtcggcgtcctgttcgaagccgaccagctcacaaccgaactcaggccggtggcccagctcaagcaggcgctcgcgcatcagctgttccgtcagaaactgcgggaccatcaagggttgctggtagggctcggccggtgtcggcgccgtggatgcgctgaaatcggcatcgctgtagctgccgtcgtcgcggtagcgccggtcagtcggatagactccacccaccgccatcaagcgatcgagaatccccaggtcttcgaagacctcctgggacctgggctggatgcccttgccacgcgagccatggaaaggccggggatttttttcgatcaggcgaaaggtgatgccccttctcgccaggtcgatcgccaaggtcaggccggcggcaccggcaccacaaatcagtacatcgacagccgattgcgctttcatactggatcacctatatgtgcaatacgcacatattaagagaggcgaacaccgtgtcaattaaaaatgtgcaaagcgcacatatatccgcccagctgcgtgacctgcatggctcgctggttgaaatcgtcggggtgatgaaccgcccgcaacgcgacgaggcaatggtgcgcgaggccggaatttccctggaccgcgccctgtttccgttgctggtgctggtggagcgcctgggcccgattggcgtggttgaactggccgaccgcgtgggccgcgactacaccacggtgagccggcaggtggcgaaactggagaacctgggcctggttacgcgccaggcaagcgcacttgaccgccgcgtgcgcgagtcagtgatcaccgataaaggcaaggccatgaccgaccgcgtcgatgacgcacgcgagaggataggtgtgtcgatcttctccacctgggaggaaggcgattttgacaatctggtgcggttgatgcgcaagtttgccgaggacatcaaggaggattccgtgcgtgcgacgaaggggatttcctgaggccacccacttgttggtttgctgtggcaagcccgctcgccacaacaagtccgttcacctcagcaagcctgcgcacggcatcaatccaatgccaattccaccaccccgccgttcaaccgcaccggccatacccgcaaccgctgctccggggtctccaggcactgcccgtcttccagccggtaatgctgcttgtagatgggcgccgccaccaccaggtcgcccttgatgctgccgatcaaaccgcgaccgatcacattcgccccggactccgggtcgtgattgtcgatggcatacagcgtctgcgcctgcgcgcccggcaggtagaacaacgcgacttgcgcgccgtccagccacaccaccacgccggagtcgcgcaccaggtcttgctcgcggcacacctgtgtccaggtggccaggtggcgttgggtattggtttggctcatcaggcaatctcctcggtgacggcaatcaggttgagttcagcagccatgatcggccggcgttggccgcgttcctggacgaagtggatgtccgggtcggggcgtttgtcgttgacgaaggtgcggaaacgcttgagtttttccgggtccttgagggcgttggcccactcgcattcgtagcggtcgaccaccagttgcatctgcgcttcgagttcggcgcccaggcccaggctgtcgtgcaggatcacgtccttgaggaaatccaggccgccttccaggctctcgcgccacaccgaggtgcgctgcaacttgtcggcggtgcggatatagaacatcagaaagcggtcgatgtagcggatcagcgtggcgtcatccaggtcggtggcgaacagctccgcatggcgcggacgcatgccgccgttgccggcgatgtagaggttccagcccttctcggtggcgatcacgcccacgtccttgctctgggcttcggcgcactcgcgggtgcagccggacaccgcgaacttgagcttgtgcggcgaacgcaggcccttgtagcgatcctcgatcagcagcgccattttcacgctgtcttgcacgccgtagcggcaccaggtgctgcccacgcaagacttcaccgtacgcgtggacttgccatacgcatgcccggtctcgaaacccgccgcgatcaactcgccccagatatccggcaactcgtgaagctgtgcgccaaacaggtcaatgcgctggccgccggtgatcttggtgtagaggtcgtatttcttcgccacctcgccgatcacgatgagtttttccgcggtgatctcgccgccaggaatacgcggcaccaccgagtaggtgccgtttttctgcatgttggccatgaacgtatcgttggtgtcctgcaatggcaccagggaagcgtccatgatcggctggttccagcacgacgccaggatcgaacccaccgccggcttgcacacgtcgcaaccggtatggccacggccgtgcttggccagcagttcgtcgaaggtgatgatgccttccacacgcaccagcgcgtacagctcctgccgggtgtaggcgaagtgttcgcacaggctcttgtcgacactcacgccacgcgcaatcagttcatgttcgaacacctgcttgagcaacccggcgcagccaccgcaaccggtgcaggccttggtctgggacttgagcaggccgaggtcgctgcaactgccgtcgatcgcagagcagatcgcacctttggtcacgttatggcaagaacacacggtggccgattccggcagcgcaccggggccgagggtgggtgcgccgctggtggatggcaggatcaggccggccggttcggacggcagtgtgatgccgttctgcatgtactgcagcaaagtgtcgtagtagctgttgtccccgaccagtacggcaccaatcacctgcttacccgaagcatccaccaccaggcggcggtagctcgcgctggcctcgtcgatgaattgatagctgcgcgcgccaggcgtgtgggcgtgggcatcgccgatggagcccacgtccacgccgagcaacttgagcttggtcgacatgtcggcgcccacaaacggctcggcggtttgcccacagagcagcgcggcgacgccccgggccatctggtagcccggcgcgaccaggccgaacaggctgccgttccaggaagcgcattcgccaatcgcgtagatattcgggtcgcagctcaggcattcgtcgttgatcaccacgccgccacgcgggccgatgtccaggccggcctggcgggccagtgcgtcctgggcgcggatgccggcggagaacacgaccaggtcggcttcgaggaattcgtcattggcaaagttcatgcggtagcggtactgctcgccggcgctgatcgactgggtcgcccgtgacaaatgcacgcccacgcccagccgctcgatctgcgccttgagcgccaggccgccgaagtcatccagttgcaccggcatcaggcgcggcgcgaattccaccacgtgggcttcaaggcccaggcttttcagcgcgttggcggcttccaggcccagcagaccaccgcctaccaccacgccgcgtcgggcattggcggcggccttgcggatcgcatccaggtcttccagggtgcgatacaccaggcgcgagtcgccctcggcgccttcgattggcggcacgaacgggtaggaaccggtggccagcaccagcttgtcataggcgacacagccatcggcggtgatcacctcacagcgggcgcggtcgatctccagcaccggcacgcccaggtgcagggtcacccccggcgtctggtacagcgcagcgtcggacagcgccagcgactcggcatcgcgcccggtgaaatactcggacagatgcacccggtcataggcgcgcatcggctcctcgctgaacacatgcaaacggtagtgatccagcgcgccgcgttcgatcagttgcgccacacagtggtggccgaccatgccattgccgacgacgatcagggttttgagactgttcatataaatcacctgacaaagctcatcacggttttaaaagcaaaaaaaaacgcctgaaaccttgcggttccaggcgtctttgcctgttcttgtgcgggtttggatcgggcgactgcgccggattcaccgctattgccctggttgtcgatcgtcgttgaccgaggtgggttgcaggggagcttgcagggtctgtgccaagcgaagacccggcccgcgcttactgcattacgcgctcaacaacggctatgaacgtgagcagaatcgcctccaactggtgcgcctcgcgtcataaaagtgcacaacccttcctcctgtggtgaggggcttgttgtggtgagcggggctgttgtggtgagcgggcttgccccgcgttgggctgcgnnnnnnnnnnnnnnnnnnnnnnnnnnnnnnnnnnnnnnnnnnnnnnnnnnnnnnnnnnnnnnnnnncgcagcccaacgcggggcaagcccgctcaccacaacaagcccgctcaccacaaaaagcccggccaccacaacaaccccattcacccagcaaattgcatcaggaaaaacctggcgcgtgacttgctaggaacactccaaccgggcagtcaacgcagactgccctctcacgacaaaggcgccgtgtaacccccgttctgaacggagggttacaaggcgccttttttgtttatacgggtttcagatggccaaccaaaacatacgcagtgtgtgtccctattgtggcgtgggctgcggcatcatcctgcaggtcgagcacaataaagtggtcaaggtgatcggcgacaaggcccatcccaccaacttcgggcgcctgtgcaccaagggcaccacctgcggccaggccatcgccgagtcgggccgtatggagaacgcctatgtgcgccaggcccgcgaccatgacccggtgcgcctcggtatggacaaggccatcagcgaaaccgcccggcgcctgcgccagaccctcgacacacacggcccggacgcgctggccttctatgtatcagggcagatgtcgctggagtcccagtacctgatcaacaaattggccaagggctttgtgcgcaccgccaacatcgagtccaattcgcgcctgtgcatggccagcgccggcagtggctacaaactgtccctcggttccgacggcccgccgggctcctatgaagacttcgaccgtgccgacctgttcttcgtgatcggcgcgaacatggctgactgtcaccccatcctgttcctgcgcatgatggaccgggtcaaggccggggcgaaactgatcgtggtcgacccccggcgcagcgccacggcggacaaggccgacctgttcctacccataaaaccgggcaccgacctggccctgctcaatggcctgttgcacctgctggtgaaaaacggccataccgaccctgccttcatcgcggacttcaccgaaggctgggaagcgatgccgccatttctggaggactattgccccgagcacgtcgccgccatcaccggcctcgccgaagccgatatccgccaagccgccgactggatcggccaggccgccgagtggatgagctgctggaccatgggcctcaaccagagcacccacggcacctggaacaccaacgcgctgtgcaacctgcacctggccaccggcgccatctgccgcacgggcagcgggccgttttccctcactggccaacccaatgcgatgggcgggcgcgaaatgggctacatgggcccgggcctgccgggacaacgctcggtgctcgtcgaggcagaccgcgcctttatcgaggacctgtggcaaatcccccacgacagcctgccgcgccaggccggcagcggcacggtggcgatgttcgagcagatggccgctgggcagattaaggcttgctggatcatctgcaccaacccggtggccagcgtgcccaaccggcaaaccgtgatcaacggcctgcaaaccgccgaactggtgatcagccaggacgccttcctcgacaccgagaccaaccgctacgccgacatcctgttgcccggcgcgctatgggccgaggccgaaggcgtgatgatcaactccgagcgcaacctgaccctcatgcaaaaagccgtggacgcccccggcgagaccctgcccgactggcagatcatcgcccgggtcgcctgtgagatgggctttgccgaggcctttacctatgcctgcgccgccgaggtgtttgaagaaatcaaacaggcctggaaccccaagaccggctacgacatccgtggcgccagctacccgcgcctgcttgaaaacccggtgcaatggccctgcgcttcggttgacgcagcgcaccgcaacccgatccgctaccgccatggcggcaccctcagcttcgccaccgaaaacgccaaggcgcggttcttcgctcgcccgcatatgccgcccgccgagatgcccgacgacgggtttcccttcgtgctcaatacgggtcgcgtgcagcaccagtggcacaccctgaccaagaccggcaaggtcgccaccctgaacaaactcaaccccggccccttcgtcgaactgcaccccgaagacgccgcccgcctgggcatcaaggacaaggaccgggtcgaaatacgctcccggcgcggccacgccgtgctgcctgccgtggtcaccgaccgcgtgcagccgggcaactgttttgcgccgttccactggaacgacgtgttcggcgaacacctggcgatcaacgcggtgacccatgatgcggtggacccgatttccctgcagccggagttcaagtgctgcgccgtcgccctcagccgcgtggagctgatcgaccaccagttcctcgaccgcccttcccccgtagcagaggacaccgccatgtcgcgcctcgacgccttcgctgacatcaatggcatccgtcacctatcgccaccggccctgagcgacgacgaacgcacctacctcgccggtttcctcagcggcctgcacaccagcgccgcacgccagggctttggcgtaccgaccctgccggcaactgcaccgctggcggatgccgctcgcctctggctgaacggcttgcttgccggcttgttcagtcctgcagaatccctcgcggcgccctccccggcggtcaccctgctgtgggcctcgcagaccggtaatgccgaagccttggccgagcgctttgccaagcgcctgcgcgaaacaggcatcaccgtggaactgagcgcgatggcggacttccccgcgagcaagctggcaagcactcacaccctggcgctgatcagcagtacctttggcgacggcgacccgcccgacaacggcgaaggtttctggcacagcctgcgcaccgccgagacccgcctggagtcgttgcgttttgcggtattggccttgggcgatccgaactacgaccagttctgcaaccacggcaagcaactcgaccggcgcctgctggaactgggggcaacccgcctgctggaacgggtggactgcgacactgaattcgaagccgccgccgatgcctggctggcgcggttccagcagaccctcaacccggcaaagccgatggcaccggccacccccgccggtaaaaccaagctgtacggctcacgcctgttgctcaaccgccacctcaacccgcacagcgcgcacaaggaaacccgccagttcgccctagacctggccgactccggcctgacctatgaagccggggatgccctgggcatacggccacgcaactgccccgaactagtcagcgaactgctcgacctcacccgcctgagcgccaacgccagcgtgaacatcgacaccttcggcgatgtgccgttgcaacaggctctcacccagcattttgaaatcgcccggcccagcagcgacaccctggccttcatcgccgagcgcagcgccgacccaggcctcaagcacttgctcaagcccgagcacaaggccgaactcaatgactggctgtggggccggcaactggcggacgtgctgcaggaataccccatcgaatgctcggcggatgaattgctaggcaccctcaagcgcctgcaaccacgcttgtactccatcgcctccagcgccaaggcctacccgcaggaggtgcacctcaccgtggccgccgtgcgctatggcaagcgcaaaggcgtgtcgtcgaccttcctcgccgaccgcgccggtgacggggaagtgccgctgttcgtgcagccgtcgaaacacttccgcacgcccagcgacggcgaggtgccgatgatcatgatcggccccggtactggcatcgcgccgttccgtgggttcttgcaggagcgccgggcgctgggtcatcaggggcgcaactggctgttcttcggcgaacagcatgccgccagcgacttctattaccaggacgagttgcaaggtatgcagcgcgatggcctgctcacccacctgagcctggcgttctcccgcgatcagacgcagaagatctatgtgcaagaccgcatccgcgaacagggtgccgagctatggcgctggctacaggagggcgccaggctgtacatctgcggcgatgccagccacatggccaaagacgtcgaccaggccttgcgccagatcgcgcaaacccacggcgggcttggcgtggaaggcgccgtggagtactggcggcagttgagcgaacagaagcgttatctgcgtgatgtgtactgattggatacagaacaatatgcactttgtattgtgtacaaaaaaccctaaagatttaccggtaccgggccgaaacagcagtgatagcaaatcgcctgaatcctgatcagggaacgcagcgatttggccgcccttcacgctgatggtcgtctcgatgaaaataaaaaataagctggtcctcgcatttgtctccgttgcatttattccggtaagcctggtggccgtgatttcggtcatgaacacacggacccaggcggtggatcagttcatcgatggcagtacccgggagatccgccagatcgatggcaacattcgccagttcttcgatggcacgttgcaaaacgtcgatcagatggcaacggatcctgtatacacgtctgtcagcacgctaaagaactaccaggccgccgatgccgccagccagccgctgccggccgaggcgcaagcggtgatcgagcgcttcgcgcgcttcggcgccacgcacccggcggcggcgatcctgtccatcggcctggaagacggcacctacgccaaatggccggatgacccgcaactggccaagtacgacccgcgcacccgcccctggtacaaggcggccatggccagccccggcaagaccgtgcgcaccccggcttattactatgacaaggacgatgtagcactggtgggcaccgcccgggcgatgctggagaacggcaaggccaagggcgtgttcgtggtcagcgtgtcgctgaaaaacctcaccgaactggtcaagagcatcaagctgggcgaaagcggctacgtaatgctgatcgaagacggcgtggtgctggtggacccgcgtgacgctgcccacagcttcaagccgctcaaggacctgggggcgccgtatgcgcaattggccgacacgccccaaggctccaccgaggtggtgatcgacggcgtacgctacatggccaacgtgtggacctcccccggcctcggctggcgctacatcggcctgatcgaacaccgcgaagtcatggctgaagccacgcgcatgacctacctcaccgcgatcatcgtcggcgtgctggtgctgatcttcgggctgatcgcggcggcgttctccaaggtcatcgtcaagcccatcggccaggtcagcaccgggttgcagtccatcgcccagggcgaaggtgacttgcgccacgaactgcacgtacagggcaaggatgaaaccgccgaactggccggctggttcaacaagttcctcgcggcgatccgccaactgatccagcacatcggcgcagcctcggccaatttgcacaacgcctccaaggtcaacagcgaggtggcgcacaacatgaacgaggcggccgggcgccagcgtgaagcggttgaattggtgtcgaccgcgttcaacgaaatggtcgctaccgccaacgaagtcgcgcgttcctgcagcggcgccgcggagtccgccgagaatggccaccgtcgcgtggccgaaggcaagcagcagatcgaagtcaccaccgacaacgtcaaccgcctggggcgccgactcaccgagtcgtcccaggccatggtcgaactggaagccggcagccgtagcatcaaccagatcctcggcaccatccgtgcgattgccgaacagaccaacctgttggccctcaacgccgcgatcgaggctgcccgtgccggcgaccagggccgtggcttcgccgtggtggccgatgaagtgcgcgccctggccaagcgcacctccgactccaccggtgagatcgagcaactgctcggcaccctggaaaacaagacccaggaagtcacccagaagatgggcagttgcctggacctgtcgcgggccagcgtgtcgtccatcgaaagtgcgcgggacagctttgaaggtatccagacgtcggtgaacgagatccgcgaccagaacctgcagatctccgccgccgccgaggaacaacacagcgtggccgaagagatcaaccggcatatccagcagatctacgacgaggcgcgcctggtagagagcctggccaactcggcgcaggacgactcggggcgcttgtcgacgctgtcggatgaactcaatggcttggtggggcgcttcaagtcctgaggaagtcggcgatctggcgccacatggcaaacgctcagatgcgcgattgcgccgggctcatgggtgatgcctctcgatcaccaggccttcagcctcgctcggcacactgaaatggcgggtaatcagatcaaactcagcatcagtggcggcaaagtcgtgctcaccctgagcgttgcgcgcatgcagcctggcccgacaggtggcgtcatccagctccaggtagtgcaggcagtgccgggccttggcggcgtgtgccaaccccagcagccattcgcgactggccactgtattggcggggaaatccagcaccacgttgaggcccgactgcagcacattgatcaccaaggggcccagtacgccgcgaatgcgctgggtgcatttgatgtaatccgcaatggcgtggatttcaccggggtaaagcgtggcgagccagtggtcttcgctgagcacaatggcagcgtgctcagtggcgagggtcttggcgagcgtggacttgccggaggcgatcttgccgcagagcaaatgcagggtgggcatggggcggttccttatgtcagtcccgccagcatgaccgccatggattgatcacacaacgccccgtttccaatgctcgtagaacgccagggccgcgacgttcttgtccttggcttcgagcatgatgtcgaagcggtcgagaaactgcagcgcataatcgttggtccagcggttccacatctgtgcgctgtgggcgtacaggtcgcgcttggacaccacctgcaacagcgcgtccatttccagcttgtgttcggcgtcgaagcccagttcctgcagactctcctggggttgggagtagtgcatggtcgggcgcacgccacgccagctttcaatcacccgggcgacccgctcggagtgggggtcgatgtagtcgttctcgttgatccagcagtggtggatgtccaggaccaccggtgccaggtcggcgacttgcaggcaatggtccaggccataggtcttttcgtcgttctcgaacgtgatgcagttgcgcgccacctccgacaggcgcgaccacacggcgcgggtgccttccacaccgagacggccggcgatatgcacgttgcacttgaggtcttggaagcgccggccatagcccatcatgcggatcatgtcggcgtggtattcgaattcggcgaggctgttttccaccacgccggggttttccgaaccgagtacacagtattggccagggtggaatgacaggcggatatccgaggcgcgggccagctcgccgatggcggcaaacccctctatcaattgacgctcgatagccgggtcttggtagacgctggccactttggggtggctgtagaacggcaacagatcgctgctcaagcgcaacatgcgcaagggcgacggcagttcggcgacatacgccaacaagcgtaattgggcggccaggttatgcgtgaccacttccaccagtttgtcccgggccacctgcggtgtgacgctgtccatccaccgcaacgtggtggtgcgtgggttgaacgggccttcgatcagcttctgggcgctggccgacaacagccgttcgggatgtttgtattggcacgcgaagccaatgcgagggtgagtcatggaggcgcctggcgtaggaaaaaggagcgaatgatacggggttagtccggggtctacccagcgcggttcccattatttctaaacgtttcacgctgaactttctcaccggcgctgcgttcacttcttatgcgctgccccgtccaggggcgttgtacaacaaggagccgctcccgtatgactaccctccccgcctaccgctacgcccccgggccgctgcatgcgaccttgctcgccggcaccgtgccgttgtttctcggagccttgctcagcgacattgcctacacccagacctaccagattcagtgggccaacttcgcctcctggctgatcgccggtgcgttggtgttcgccggtttcgcgtttctgttcgcgctggtcaacctgctgcgtgccgagcgcaaggccgggcaacccacgcgttatgtgctgttgctgttggccacctgggtactcggcctggtcaatgctttccagcatgccaaggacgcctacgcctcgatgcccggcggtctgatcctgtcggctattgtcttgctgttgaccctggccgccacctggaccggcctgcgtgcgggaggtgtcaaatgaaaacgtccaacacattgacgctattgagcaccgccctgctgctgaccgcctgcggtggtgaaggcgacaagacccaggcccgtggccccgaccccaagttgccggaacagcaaagcagcctgttgccgagcatgaagatcgccgagcccgcgccctggggcgaacagaaacccaaggtgccggacggctacagcatcaccgcgattgccaccgacctggcgatcccgcgccagaccctggtgctgcccaacggcgacatcctggttgccgaaggccgtggcggcagtgcggccaagctcaagcccaaggatgtgatcgccagcctgatcaaggccgagggcaacaccaaggtcaagagcggcaaccgcctgaccctgctgcgcgacgccgatggcgacggcaactacgaactcaagaccgtgttcgccgacaacctcaatgcgccctacggcctggcgtttgccaacggcaaactctatgtggccaaccaagacgcactggtgagcttcgactacgccgatggccagaccaaagccagcgggccgccgagcacagtcaccgccctgccggcacagatcaaccatcactggaccaaatccctggccgtaagcgccgatggcaggcagctgtacgtgggtatcggctccaacagcaacgtcaccgaacgcggcatggaagtggagatcgaccgcgcaatggtctggcagatcgacgccgccaccggtgcgcacaagccctacgccaccggcctgcgcaaccccacggcactgaccatccagccggacaccgggcaactgtggacagtggtcaacgagcgcgacgaactcggcccggacctggtaccggactacttgacctcggtgcgtgaaggcgcgttctacggttggccctacagctactggggccagaacgtcgacccgcgcgcccagccgcaaaacccggccaaggtggccgccgcgatcaagccggactacagcctgggctcccacgtggccgccctcggcgtggacttttccatcccgcagatgggcgagcagtttgccgatggcgtattcgtcggcgagcacggcagctggaaccgcgacaacccggtgggctacaaggtgatcttcgtgccgttcagcaatggcaagccgtccggtgagcccatcgacttcgccaccggctttcgcggcgacgacggcaagacccgtgggcgcccggtgggtgtgacggtggacccgaaaggtgcgctgatcatcgccgatgacctggccaataccgtttggcgcgtaacgcgaaaccgttaaacaaaatgtttgacatgattgccttaggcaacaatattgttgcctaaggcaaccattcgagcatttcaacatgtccacccccttgcttgtcgaacgcgccggcatcgtgcgcggcttcaatcgcttctacacccaccagatcggcgtgttgcaggaacacctgctgcaaagcgattactccctcaccgaaatccgcgtgatgtacgagttgtcctcccgaggtgatctcaccagcgccgacctgtgccagatgctcggcctcgacgcgggttacctgagccgcctgaccagtggttttgaaaagaaaggcctgatccagaaagtccgctgcgccaccgacgcacgcgccgtgcaattgcacctcaccgaccacggccgcgccgtgctggcgccgctggagcagcaaacccagcgcgaagtcatcgcccttctcgacagcctccccgagccacaacagcagcagctcaccgcagccatgaaacgcatccaggccctgctgcaaggcacggcgcccagctacctgctacgcgacccgcaacccggcgacatgggcgtggtggtgcagcagcaaaccgcgatctacgcccgtgaatacggctggaactgggagttcgaagcgctggtggcggagattgtcgccaagtacttgcgcgagtttgatcagacctgcgagcgttgctggatcgcggaaaaggacggtgaggtggtgggctcggtgttcgtgatccgccatgaccagaccacggccaagctgcgcatgctctacgtggatgccagcgcacggggcatgggtatcggccagcgcctggtggatgaatgcgtacgctttgcccgccaggtgggctacacacgcatgctgctgtggacggtggacatcctcaccgacgcgcgcaagctgtatcagaaagccgggttcgagttgatagaggaagagccgatggtcagcttcggtaaaaccctggtcagccagacctgggctcgccagctgtgaaacagtcccgcgccagggcggcgcgggacatgacgccttacaggtcagtgatttccttgtggcgcggcaccagcgttttcatcacgctccaggccaccaggtaggccagcgcacagatcgcgaacatgatcatgtagccggtatggatgtcgttgatggacttgtagtagtcgaacacccagccgccgatcttggtcatcaccacgccacccaggccgccggccatgccgccgataccgaccaccgaggccacggtcttctgcgggaacatgtcggacaccgtggtgaagatgttgcacgaccacgcctggtgcgccgaggcgcccacaccgatgagcattaccggcacccagaagctgatatagcccaacggttgcgccagcaagaccaccagcgggaacaacgcaatcaccagcatggctttcatgcggccgtcatagggtgcatcgccgcgcgccatgaagtagctggggaaccagccgccaccgatgctgccgaccatggtcatgctgtacagcaccgccagcggcatgacgatatccgcgcctttcatgccgtactgcgctgacaggtaggtgggcagccagaacaggaagaaccaccacacgccatcggtcatgaacttgccgaaggcaaaggcccaggtctggcgataggtgagcaacttgagccatgagacctttttctccacggcgctggccgctaccggggtgaagggctgcacggtctggtcgctgcggatataggccagttctgcggccgacaggcgtttttgctcctccggctttcggtagagcgcgatccacaccgcgacccacacgaacccgagcccgccgattacgataaacgccgcttcccagccccacagaccggcaatcaaaggcacgcagatcggcgccaggatcgcgcccacgttggcgccggagttgaagataccggtggccagcgagcgttctttcttggggaaatactcggcggtggccttgatcgcaatcgggaagttgcccgcctcgccaatcgccagcaccgcacgggacagcatgaagccagcaatcgacaccgggatcaccgccaggccaatcgcaccgctgatggcggcgatgccctcgcccatcggcaccgagaacgcatgcatgatggcgcccgtggaccagataccaatcgccaccacataggccgccttggtgccgatcttgtcgacaaagcgcccggcgaacagcatcgagatcgcatagacaaactggaacaccgccgcaatgttcgcgtagtcggtgttgctccagccaaattgcgtggacagctgcggcgcaagcaggctgagcacctggcggtcgaggtagttgacggtcgttgcgaagaacagcatcgcgcagatggtccagcgatagttgcctaccgcttggccaacgcggtgcgcgtggatgggctcgttcaagttcatggcatcactttttatttttgttaggtaggacatatgtaacgtcatatgtcgtcgtacaactgcgacttttatatccggccgcctaccggctgtcaatctgaaagattgccgtttatcgaggtattgcgagggtcattgaaaggtcaggtctatgcagttgtaggatgacaaatgcgcatgaccaggctgggcgccttgccccgtacatcgtcgagcacgccaaacggctgcatgccgatcttttccagcacccggatcgaggccccgtgatccggtcgcaccagcccgaacacctcgggcaaccccaggctgtcgaatgccagcgccaacgcgtcatgccccaactcggtggcatagccctgcccccaggcttccaccgcaaagcggtaacccaggttgatgcgccgctcggtcaggtagtcgaggggcgcgataccgccgaagccgatgatgtggtccggcgcctcgcgccgtgcaatcgcccaccagccgtacccttgggtcacccactgtacgagccagtgatccagcaggcgttgcgccacctccaggctggccatggggccagacgggttgaacaaattggtctgcgggtcgccgaagatcgcgaacaatcgctgcaggtcgttcgcttgtggttggcgataggtcaggcgtgagccggcggacatgcggattactcctctgtggctgtagtgagcgggcttgccccgcgctggggcgcgaagcggccctaacaccaagcaccgcattttgtctgaagaaatgcggtgattacattggggtggctgcgccacccagcgcggggcaagcccgctcaccacaacaggtccgctcaccactaagcccgctcaccgcaaagaatgcaaaaaaagcaaaatacgggtgaattatttcatgtccacttgtatctgaagtgacagagcggtgccatcgcagtgatggcgcctcccctgttctgctttagagtgccccgcatgaaattacgtaagaaaagcgtcaagcccatcggattgaaagacatcaccatcgtcgacgacaccaaggtgcgcaaggcgattaccgccgccgccctgggtaatgccatggaatggttcgactttggcgtctacggttttgtcgcctatgtgctgggcaaagtgttcttccccgacgcctcacccagcgtacaaatgatcgctgcactcggcaccttctcggtgccgttcctgatccgccctctgggtggcctgttctttggtgcactgggcgataaatacgggcggcaaaaggtcctggccgcgaccatcgtgatcatgtccctgagcaccttcgccatcggcctgatcccctcctacgcctcgattggcatctgggcgccgatcctgctgctgctgtgcaaaatggcccagggcttctcggtgggtggcgaatacaccggtgcgtcgatcttcgtcgcagaatatgcgccggaccgcaagcgcggcttcctcggcagctggctggacttcggctccatcgccggcttcgtgctgggcgccggcgtggtggtgctgatttccagcatcctgggcgaagccgacttcgagtcgtggggctggcgcctgccgttcttccttgccctgcccctgggtatcatcggcctgtacctgcgtcacgccctggaggaaaccccggcgttccagcagcacatggacaaaatggaacaaggcgaccgcgaaggcctcacccacggccccaaagtctcgttcaaggaggtcgcgaccaagcactggcgcagcctgctgacctgcatcggtatcgtcgcagccaccaacgtgacctattacatgctgctcacctacatgccgagctacctgtcccataacctgcactacaaagaaaacagcggcgtgctgatcatcatcgcgatcatggtcggcatgctgttcgtgcagccgttcatcggttttgtcagcgacaagatcggccgcaagccgttcatcatcgccggcagcatcggcctgctgttcctgtccattcccgcctttatgctgatcaccagtggcaaaatcgggctgatcttcgccgggctgctgatcctcgcggtgatcctcaacttctttatcggcgttatggcctcgaccctcccggcgatgttcccgacccacttgcgctacagtgcattagccagcgcgttcaatgtctcggtattgatcgccggcgttacgccgaccgccgtggcctggctggtggaaagcaccaacgacctgtacatgccggcctactacctgatggtgtttgccgtggtcggcctggtcaccggcctgaccatgaaggaaaccgccaacaagccattgcgtggcgccgcaccggcggcgtcggacatggaagaagccaaggagttgttgcaggaacatcacgacaatatcgagcagaagatcgaagacatcgacgccgagattgccgaactggaagccaagcgtcagaacctggtgcagcagcatccgcgtatcaactaaggcctgaccctgcatggcggccccagccgccgccatgcttttggagagttcaaccatggttccaagcgtcaccgcaccacagtcgttgctcagcgcagatgaacgcgccgccatcgccgaaatagaagccaccaccagcatcctgcaactggtcacccgcctgaccggcatgcgcttcgccggcatcgccaaattcaccgacctggaatgggtggtctgctctgtgcacgacaccgtcgacatgggcattcacgtcgacgacgtactcgacctggaaaccacgctgtgcagcgagttctgcatcaacccacagaccctgttcatcccgcagatcagccagagcggccgcttcgccgcgcgcccggtggtcaagcaattcgccatcgaaagctacgctggtgcaccgatcttcctgcccgacggccgtctgttcggcgcactgtgcgcgctggattcacgggcgatgctgttcgaagaccccaacctgccggaaaccctgagcctgtttgcgcggctgatcgggtgcattttctttgccaacctgacgccccgtgacacctgatcgttcagcttttcaagcgcgctgccgatagcctgggatacccctgacttgcagcgctgccctgcgggaaacaatgccgaacactctcgccccgatcgtccgtacgctctccaaccgcaccagtctgtcgctgacacgtacctccctgttcaatttcacggccctgttggtcctggtctttgcagcggcagcttattcgctgatctacctggcccatgaactggaccacgccgagcaagaggaaagcgcgttttacacgcgtaaagccgtgcagtccctggaaaaatccttgcgggtcaccgtcaaggactacgccttctggagcgacgcgtacaagcacttgcacctcaaggtggacaccgattgggcctacggtcgcggcaacatcggcgccacactgttccaggatttcggcttccagggcctgttcgtggtcaacgatgccaaccgcacggtgtacgccgtcgtcgaaggccaactgcaacccattgacctaagcgactggcttgcccagcccatcacgcacgtgctggaacaggcacgcgccggggctgagcaggagctgccggtcaccgcttttatcaacgtgcatggcagcccggcacttgtggctgcagccgccatcacgccaggcaccgaccccacggtgaagatggatgggcgccccgcatcggtactggtgtttgtcgacatcctcgacagcgcccaactggccctgatcggcaatgatttcggcgtcaatcaactgcatatcgccagcgccgatgagatcggcaagaccttgctggttcctctgggcgacaacggtgctgccggcagcctgcattggcagccagcgcgcccgggtgtgcggttgatgggcgtgggcttgccgctgctgggcctggccgcgttgctggtatgcctgatgacctgggtgatcctgcgccgcgccagcgccgccgccctcgccctggatgccagccacgcatcgctgcaagacagccaggacgcgctgaccaccagtgaagcgcgctttcgcgatgtggtggaagccagctccgactgggtctgggaaatcgatgccggctggcgcttcacctacttgtcggagcgcttcgagaacgtgaccggcctggcccgccgtgcatggatcggcgccgccatcaacgacctcctggacaccgaagccggcgcgctttcgcaatggctgaacacccccagccgcaccgcggacatcagcgtgcagtgccgctatgtcgacgcccacggccaggaacgcaccacacggcttgccgcgaggcaaatgccctgtggcggcttccgtggaaccgccaccgacgtgacggaggaagtcgaggcccggcgccgcatcgaattcctgtccgaacacgacgccctcaccgggttggccaaccgcacacgcctgcaagcgttcctcgacgacaagctcaaggcgctgccagcgtcgggccaaccgttggtcatgctcagcctggacctggaccgcttcaaaccggtcaacgatctgctcgggcacgcagccggcgaccacgtgctcaacgaagtgtcgacccgcctggccgattgcgtgcgccacggcgacctggtggcacgggtgggcggcgatgagtttgtgttgatcctcacgaatgcgggcacccaggacgatgtcgagtccctgtgcctgcgcttgatcgagtccgtcgaacaggcggtcagggtcggcgagcaggaagtgttcgtcagcgcgagcatcggcatcgtgctggcccccgatgatgccagcgaagtcgccgaactgctgcgttatgccgatatcgcgctgtacgaagccaaggcggccggccgcaatacctggcggttttactcgggggagatgaatgcacggatcatcgagcgtcgccgcctggaaagcgacctgcgttttgcaatcaagcacaatgaactgcgcctgcacttccagccgcgctatcgcattgccgatggacagatggtcggtgccgaagccctggtgcgctggcaacacccacagcgcgggctgatttcacccgagaccttcatcccgattgccgaagagtccgggctgatcctggcgctgagtgactgggtgctgcaaaccgcctgcaccagcgccgcccagtggcccgaggcattgtttgtgtcggtgaacctgtcgtccacggagttcaagcgtggcgacctggtggagcgcattcgcaatgccctcacggcgtcggggatcgagccggcgcgggtcgaactggaaatcaccgaaagcgtgatgctcgaagacgcggcgggcgcactggcggtgatgcacacgctcaaacgcctgggcatacgcattgccatggatgacttcggcaccggctattcctcgttgagctatctgcgggccttccccttcgacgggttgaagatcgaccgcagcttcctcagccgcctcgaagacagtgaggatgacaaggcgatcatccaggccatcgtcggcctggggcgtgccctggcattgacggtgaccgccgagggcatcgagaccgccgggcacctggcaatgctccgggccgtgtcctgcgatgaaggccagggctattacctcagccggccactggatatcgacacgttcaacgggctgctcggcactagcggaaaaactgactcggcgtcttgccaaactgtttcctgaacatgctggtaaacgcactcgggctgtcgtaacccagctccagggcgatatcgatcaccttctcgcccaccgcaatgcgttccagcgccagcagcaaacgtgcctgttggcgccattggccgaaggtcatgccggtttccttgcggaacaggcgctggatggttttctggtccaagtgcaggcgttcgctccagtgcgccacggtggaggcgtcgcccggctcttcctgcaacgccaggcagatgcgctgcaggcgcgggtcggcgggctgcggcaaggacagcggcaacgccggcaggatcgccagttcgtcgaggatcaggtgcatgatccgcgcatcccgtgagtcttcggcgtacggcggcttcaggctcacggacgccttgatcagctcgctcagcaacggcgagatactcacggttttcggctcgccgggcatattcgggaagcgatccgggcgcacaaacacgctgcgcattttcagggtgcctacgcaacgcagggaatgcacttgcccggcgggcatccagatgccacggttgggcggcacggtccactggttcagcgccgagtacaccaccatcacgccttcgatggcgtagagcagttgatgcttctcgtggctgtggtcggggatcacccagttttccgggtaatcggtggcggaactgatgacggcccaggcgccttcgttgatttcctgaagaaattcatccagtggtttgatcatttcgcccttttcgcgatagttgccgccccaattgcgtgagacaggcattcctgacaaatctagcatgaacgccgaatcattttgtaatggatggcgaccttaagaagttgccgcctctgattagctgccttgtatggaatgcctgcatgtcgacccttaccgcgtcacccgccgctgcaaccactacgccccaggccagccccttggtcatgcgcatcctcggcgcctgcgccctggcccacttgatcaatgacctgatccaggccgtgctgccgtcgatctacccgatgctcaaggccaactatggcctgacattcacccaggtcggcctgattaccctgaccttccagttgaccgcctccctgctgcagccgtggatcggctatcacaccgaccgccaccccaaaccctggctgctgccggcgggcatggtgtgcaccctgatcggcatcctgatgctggcgtttgtcggcagcttcccggcgatcctgctggcggcgggcttggtgggcgtgggttcgtcgaccttccacccggaaacctcccgcgttgcgcgcctggcctccggcggtcgctacggcctggcgcagtcgaccttccaggtcggcggcaacaccggcagcgccttgggcccgttgctcgccgcggcgatcatcatcccctacggccagggccatatcgcctggttcgggctgtttgccgtgttcgccatcctggtgctgtacggcttgagccgctggtaccgccaccacctcaacctgttcaagctcaagcaaggcggcaaagccacccacggtttgtccaagggccgcgtgacctttgccctggtggtgctggccgtactggtgttctccaaatactggtacatgaccagcctgaccagctacttcaccttctacctgatcgagaagttccagctgtcagtcgcaagctcgcagatgtacttgttcctgttcctcggcgcagtggccgtcggcacctttgccggtggcccgatcggcgacaagatcggccgcaagaaagtcatctggttctcgatcctcggcgcggcgccgttcaccctggccctgccctacgtcgacctgttctggacggcggtactcagcgtggtgatcgggttcatcatcgcgtcggccttctcggccatcgtggtgtatgcccaggaactggtgcccggcaacgtgggcatgatcgccgggatcttcttcggcctgatgttcggcttcagcgggattggcgcggcgctgctcggcctgctggcggacacccacggcatcgagtacgtctacacactgtgttcgttcctgccgctggtgggcatcctgacgatcctgctgccctcgaccaagggcgcctgacctgccgatcatcgcctggccgtgtgctatcacccggaatgctctgaaaaacctgcgtgtgcgcttacaatcccggttctaaacgcacaccaggcagacccggcaagacatgacgctcgaccctcccacgattttggcactcaccgttgccctggcagccgctgccgccctgtacctggccgttgaatggcgcagcgtgcgcgaaccttcgctgctgtgctggagcgccggtttcgccaccattaccgtcggttccaccctcgccctgctgcgcctcaatggctacctgatgatcggcatctggttcgccaacggcttgctggtgaccgcgcacttcctgtttttgctcggcgtggcgcggttcacccaaacgcggctgtcgcccatgtggttgctgatgctgctggtctggctgggcatgctgatgttgccggccgatccgtcatggtccaaagccatgctggcggtgcagtccctgttagtagcgctaccgaccctgcgcgccagctttttgctgcggccccatggcaagtcgctgagcatcggcgcggtgcagttgcgctacgtgctgctgatccatggcgcgttctatgtggccaaggcgctgtcggtattgatccccggcaccttgatcgacctcgccgccttcaagggcgagatcatccagatttccctggtggaaggcgccatggcgatcatgctcatcgcactgtcgatgaccggctccgagcgctatcgtcgcgaacaacagatcgcccgcctcgccgcccgcgacccgctcaccgccctctacaaccgccgcgccctcgacctgcgcgccccgcgcctgctcgctcaggtaacgcccgcacaaccgggcgccctgctgctgatcgacatcgacaacttcaaatcggtcaacgaccttcacggccacactgccggcgaccgtctgctgatcgccctcagcgaaatgatccgcagcgtagtgccccaaggcgcgctggccgcacgcctgggcggggatgaattcgtgatcctgctcaacccggcgtccaccgaacagatcgtcgaactgggcagcagcctgcgcgaccagttccagcaactggccgcgcagagcttcaccacgccggcgccggtgacgctgagcattggcgcaaacctgttcgaccaaccgccgccgagtttgacggcgctgatcgagcaaggggataccacgctgtatgaaaccaagcgcggtgggcgggacagtattcggttggtggatcggacggggtcgagttcgtacggctaaaggtcgtaactcaccgccacactgcgcccggtcctcaccgactccaacgcacactccgccaaatgcaacgcatacaacccatcccgcacgctggtgggcaatgccgtgccgttattcagcgcatcgatgaactgcgccagctcattgcgatacgcatccgcataccgttccaggaaaaagtgctgcaacggttccagcgcctcggtgtgttccgcgctccagtggcgcagggtgctggggcggtggttgtcggtgagcagcacgccggtggcgccggagacttcgacgcgctggtcgtagccgtacaccgcctggcggcagcagttgatatggcattgcttgccggaggcggtgcgcagcagcaccatcacgctgtcgtagtcgtcgatttcggccaggctcgggtcgaccaggcggctggcgatggcgctgacttccaccggctcttcgccgagcaggtggcgggcggtgtcgaaatcgtggatggtcatgtcgcgcaggatgccaccggagtgggccaggtagtcacgcggcgccaggccggggtcgcggctggtgatgatgacttggcgcaccgcgccgatctgcccggcgtcgagggccgcgcgcaggcgcagcatgtcggggtcgaaacggcggttgaaaccgagcatcacgcgaccgccctggcgctccaccgcctgggcagcactgcgggccttggcgatatcaaggtcgatgggcttttcgcagagcaccgccttgcctgcggcgacggctgccagcagcaggtcgatatgcgtgtcggtaggcgtaccgatcaccacggcgtcgatgtcattacgggtgagtacggcggcgcaatcgtaggccgcctcgcaccccagttgggcactcaacgcatcgacgccttcgcgccaggggtcagccaccagcaccagcgtggcattgggatgggcggcgacattggcggcgtggatcctggcgatgcgcccggcacccaggacggcgattctcagcatggtcgaactcctgatgttgttattgagggagtaatcagtcgggcaggttgaacggcgtgacgatctgcacctgggacggtgcaatcggcccggccttccagagccggtggtagtgcaggatgtgcaggaacacgtggcgggcatcgatctgcaggttgtgatcgataatcgcggcgaccttttcttcgcgcagcaactggcggttttcttcgtcgaggtcgtggccgatgaacacctcaaggggccgatcgaaggcggcgaacgcatcgacaatcgcgcggttgccgccgccgacgctgtacaccgccttgagctcgggatgctgttgcaacgcctgggtcacccgctcgaaggtgcggtcgtacacgccgtagccgccactgacgtcgagcacccgcaagtgcgccgcacgcccacgcagccaggcccgaaagcccatctcacgctcttcttcaccacggaacagttcgctgccgatcaccacggccacgtcctgaggctgcgccggcagccaacgcgacatcaggtaggcggcagtctggccggcggtgcggttgtccatgccgacgtagccgatgcgctcgctttgcggcaggtccgtgaccagcgtcaccaccggaatccccgccgcgatcagttgcttgaccgccaggttcaccgccggctcatcggcagccttgagcaccacgccctggctgccggtgtccaggcagcgcagcagttggtcgtgcatggcctggggttcgatctcttcaaacaggtgaaagcgcggggcaatgcggaacggcgccaggctgcccagttgcgcgttgatcgccgtctgtaccgccgtactgaagcgcttgggcgtgtgcatgatcacatcgacgtggaacgtgcgccctaccgccaggccgtttttctcctgggactccagctcctccagcgcctgctcgatacgccgccgggtctgggcatgcacgctgccgcgctgatgcagcacgcggtcgaccgtagctttgctcacaccggcctgggtcgccagttgcttgatggagaagtgtttggcgcgttcgagcatggggcctcacttgaggtatttttgaggtgttttttgggtattactgaggttttgcaatgctagtctcagttttgtccggcgtcgagccgggcgatgaacaacaacaaaagttccgggagaactgcatgcctaacaccgatctcgccacgtcgttcagcggccaatattttgtcgtcaccggcagcacccagggcctgggcgcggcggtggcccgtaccctggcaagccgtggcgccgccgggctgatcatctgcgggcgtcggcgcgcccagggcgaagagcaggtgcggctgttggcccaactggattgccaagcgatatttgtcgaggcggacctggagaaggtcgaggactgccgcgcaatcatcgatgccgcgcgtatccatttcggcaccctgcatgggctggtcaactgcgccgggatgtcggatcgcggcaccatcctggatacctcccccgagctgtttgatcggctgatggcggtgaatgtgcgggcgccgtttttcctgatgcaggaagcactgaagctgatgatcagcaacggggtagaaggcgcggtggtgaacatccagagcgtcaccgggcatggcgggcaatccttcctgagcgcctatgccgcgtccaagggcgcgctggcgatcctcaccaagaacgtggcgttcagcgccctgcgcaatcgcatccgggtcaatggcctgaacatcggctggatggacacaccccacgaagatgacatccagcgccagtaccacggcgcccaggatggctggctggaaaaggccgaaagcgcgcagccgttcgggcgtctgctcaaacccgaagaagtggcgcgcagcgtggccttcctgctgtccagcgagtcgggaatgatgaccggctcggtgatcgacctggaacaaggcgtggtcggctgtaccgacggcggcagcccgcaaccgaatcaggcgctgggaggtgtgtgatgtcggcgttcgtgacggaacaggccgtgcgcctggcggacttcagcgagatctgtgcgcaacgcgtgagccgagaggattaccctctgtgcgctgaagttcagagcaatgtgccgatctatcaggcccacaccctgcgcaatagcgaccgcctggcggtgatgaatgaactgcaccgcctgttccgcgaggggcctggggtgatggtggtgcgccgggcctacgaagatctggaagtggtcgaccgccacagccaggtgttcgaggcgatcttcgcccaagaggcggcgcagggcgtggcagccgaccactttgccaaggccggcagcaacgggcgcatctggaattcattgcagaaagccgcgttgcactcgccggcgtcgtttgtggagtactacgccaacccgctgctggggttgatcgccgaagcgtggctggggccgagctaccaggtcacggcgcaggtcaacgtggtgcatcccgctggccaggcccagcaaccgcaccgtgattaccacctgggctttcagaccaatgatgtagtggagcgctttcccctgcccctgcacctgctgtcccagtacctgacgttgcaaggcgcggtggcgcactcggacatgccgctggaaaccggcccgacccagttgctgccgttttcccagcaatacgccctgggttacctggcgtggcggcgcccggagtttatcgactacttccagcagcacgccgtgcaactgccgctgcacaagggcgacctgttgttcttcaacccggcgctgttccatgccgccggcaccaaccgcacaaccgaccgccaacgcatggctaacctgttgcaggtttcctcggcgttcggcaaacccatggaagccctcgaccgcgaccgcatgatgctggcggtgtacccggcgttgctcgagaacaccgcactggatgcccaggccgtggcatcggtgattgcctgcactgccgacggttatgccttccccaccaacctcgacaccgacccgcccttgaagggcctggccccgcaaaccgcgcaacaactgatgcagcaagccctcgacgaacgctggccactcccggactttgccgctgccgtggagcagctgcgaaccaagcgtcaagcgtgaaccctctgtttcaacaacaacaaaaacaacggagcaccctcatgaagaagcaactccttgcgacactcctgaccctggcgataagcccctgggcgctggccgatatccgcatcggcgtgagcatcgcccaggtcgacgacgtcttcctcgcgcagatgcgtgactacatggccgcccacgccaggcaactgcccgacgtgaccctgcaattcgaagacgcccagggcgacgtggtgcgccagctcaaccaagtgcagaacttcaccgcccagggcatggacgcgattatcgtcaacccggtggacacggccgccacgcaaaagatgaccgccaatgcccagcaagccaagacgccgctggtgtacgtcaaccgccgcccggatgcccagcagttgccaccgggcgtggggtatgtgggctcggacgaggtcaaggccggtgaaatccagatgcgctacctggcgcaaaagatgggcggcaagggcaacctggcgatcatgctcgggttgctctccaacaacgccacgcacaatcggacgctgggggtgaagaccgtgctcaaggagtaccccgacatcaagatcgtcgaggaacagagcgcggaatggcagcgcagcaaagcgattgacctgatgaacaactggatcgtatccgggcgcaaaatcgacgcggtggcggcgaacgcggatgagatggcgatcggcgcggccatggcgatcagccaggcgggcatgcagccgggcaaggatatcctggtagccggcagcgacggtggggctgccgggctggatgcggtgaagaaaggccagttgctggtgacggtgtatcaggacaacaagggccaggccgtgggctcgattgacctggcagtgaagatggtgaagaaggagccgtacacggctgaactgaccattccctatcaacagatcacccaggacaactaccaggccttcctcaacccttgagccgaacgaacctgttgtggcgagcgggcttgccccgcgttgggctgcgaagcggcccctttcaaaaccgctgcggtgtttcagttgaaccgcgacatcagttattggggctgctgcgcagcccaacgcggggcaagcccgcttgccacaacaggccctctcaccagagggagtttgcctcaaccggtcttctcgctgaacggttcaagcccattcaccaccagataaagcaacggccccaccgacacaaacaccgccgtcagcacaaagtacggcaccaccgaaagtaccgaacgcccccgccgccgcgcatcccggtacatccacacgcacgccagcagcgccatcaaatacaggtcgatcaccacttgcgcggtgtccggtcgcgacatcaattcgcgcccgaacgccagcagcgactgctcggccgtcagcagcgtgaacagggtgtatgacgaaaacagcagcaaaccgaccagcgcaacacgggatcttttcatgggttgttccttggggtgatcaaggcccacgttagtgataaggttcggcccctcgcaatgacctcggaggtcatgattccgccatggacacccctgccaccgccggcgaacagctgcgccacttgcgccggcaagcccggctcagccagctcgacctggccctgatcaccggggtgtcccagcgccacctcagttgcctggaaaccggccgcgccaagccaagcccgggcaccttgcacaacctgctgacggcactggaggcaccgctggaccagcgcaaccgggtgttcctcgccgccggctacgccccgcgctatagcgccacgccactggcctcaccggcgatggccgcgattcgcgaagcggtcagccatgtgctgcacgccaacaaccccgcgccggccatcctgctggacagccagtggcaggtgttggcggcgaatgccagcaccgccgtgctgcttgaactggtgggcatcccgcccgattcagccgagggcttaaacctgctcaccacgctgttgcagtcgggcggcctcggcgatcacctgaccaatgccgacgagatccgcaccctggcctggcagcgcgccacccgtgaggcgctgggcaatcctgaactggccgccctgctggcgcgtttgccgacgccggccagcaccgagttgcccgccgacatgccgccgctggtactgacgcgcatccgttcaagccggggcgaattgagttttctgtccaccttcaccaccttcggcatgcctcaggacattaccctctcctccctgcgcatcgaacatctgattcccgccgacgacgccacctggcaggtgatgcgcgcggcctatgcgagttatgccgcgctggttttgtgaaatatctgtacgtagactgccgccatacccccacctgaaggcggcgaaaaaaacgtgatgcaagttaccgaagtctccattgcccaattgcgcgcggcgcttgaatccggccagaccacggccgttgaactggtaaaagcctacctggcgcggatcgaggcctatgacggtccgcacaccgccaccgccttgaacgccgtggtggtgcgcaaccccgcagcgctcgaagaagccgaggcgtccgatgcacgccgggacaacggcgaaaccctggggcctttggatggcattccctacaccgccaaggacagctacctggtcaagggcctgaccgcagcgtccggcagcccggcgtttgccgacctggtcgcccagcgcgatgcgttcaccatcgagcgcctgcgcgccggcggcgccatctgcctgggcaagaccaatatgccgccgatggccaatggcggcatgcagcgtggcgtgtatggccgggcggaaagcccgtataacgccgactacctgacggcgccgtttgcttccggctcatccaacggagccggcactgcaacggcggcgagctttgcggcgtttggcgtggccgaagaaacctggtccagcggacgcggcccggcgtccaacaatggcctgtgtgcctacaccccgtcccgtggggtgatttcggtgcgcggcaactggccgctcacgccgaccatggacgtggtggtgccgtacgcgcgcaccatggccgacctgctggaagtgctcgacgtggtggtggccgaagacccggacacccgtggcgacctgtggcgcctgcaaccctgggtgccgatcccgagcgtcacctcggtgcgcccggcgtcttatgctgacctggccgtgactgccgaatccctcgccggtaaacgctttggcgtgccacgcatgtacatcaatgccgaccccgacgccggcaccagcgaaaaacccgggatcggcggccccaccgggcagaagatcaacacccgcgccagcgttatcgacctgtggaacgacgcccgccaagcgttggtggcggccggcgccgaagtgatcgacgtggatttcccgctggtgtccaactgcgaaggcgaccgccccggcgcgcccactgtgtttacccgtgggctggtgtccaaggagttcctgcacgatgaactgtgggaactctcggcctgggccttcgatgatttcctgcgcgccaacaacgacccggcgctcaaccgcctggcggatgtggacgggccgaagatcttcccccacgacccgggcaccctgcccaatcgcgaagacgacctggccgccggcatggacgaatacgtgcgcatggccgagcgcggcatcaccccgtgggaccagatcagcaccctccccgacggcctgcgcggcctggaacaaacgcgccgggtcgacctggaagactggatggacaagcttggcctcgacgccgtgctgttccccaccgtggccgacgtaggcccggcggatgccgatgtgaacgaagcctccgccgacatcgcctggagcaacggcgtgtgggtggccaacggcaacctcgccatccgccacctgggcgtgccgaccgtcaccgtgcccatgggcgtgatggccgatatcggcatgccggtggggctcacctttgccgggcgcgcctatgatgactctgcgttgctgcggtttgcgtcggcgtatgagtcgaccggcagcaagcgcctggtgcccccgcgtacgccggcgctttaactcaaggcatgggcacggcaatcaacaggattgccgtgccatgggccagcgtcgccgccagcacgccataacgcatacgcaccagcgcgcaagccagcccttccagcagggtaaacagcaacaccggccaccccagttcagtcacgctcaaggccaggaaagcatggcaggccgcaaaagctacgccgctgatcagggccgcacgcaacggcgctacctgctgctccagatagccctgcaaaaacccacgaaacaacacctcctccaacgcattggcgccataggccaacacgaccatgcccggcagccatacccaataacccacaagcgctgacgcttcgatgccctggtacaaccgcagcggcacaccgatcaagccaccaaccgcgagcccgatcatcagtcccgcgacacgcggccccctggaccagacgatcagcgccgccaagtcaggtgccacccgcacaagcgccgtaatcaataacaccgataaaccacccaatgctgccagcaccaaggtgttggccgtgaaggcaagctgcacctcgctgcccagcgaccacaagcccaacggcgtcatcacatcgcgcatcagcacgaacgccatcaacagaatcaggatgcgcaacgccgtcagcgacttgggcgtgagcgcgaaccacaggccgaacaacagcagccccggtgccaggtacgtgctgtagtggatcaataccaccatgccttgggtaatcatcgatcgctcagccgtgcgccagcgcaatcatttcgatctccaccgccgccgacttcggcagctgcatcacgccaatcgaggtccgcgtatgcaccccggcgctgccgagaatctcgtgcaacaggtccgacgcgccgttggccacttcactctgctgatcaaaatcctcggcactgcgcacgtacacggtgatgcgcgggatggccttgatctggtccagcgaacccagggcctgctggagcaaccccaggcagcgcaacgcgctgatgccggcggcgacttgcgcctgggcgagggtcaggctgtcaccgaccttgcccggcagcacgatggcatcgccgacacgcgggatctggccgctgatgtacaggtggttgccatcgcggaccagcggcgtgtagttgccaccgatcttgaattcattcaactgatagccgatgcgcagctgggcggcctggtatttttcgtcgcgggtcatgggcgtgcatcctcgttgcgacgttgccactcatccaccacgtcgcccagggtcttgggcctatcgttgcgaatccaggccatgaagggccggtcgaacttgaaccctgggccgcagtgctcaagcatgaagcggcgaacgttctgagtgtttttgtagtggggggtgacgggggtgtcgcgggtgatggggtcgctgtgccagtcaaaatccatgttgtctctcgggcgccgtggggtttcggcgctagcatagcgatgtgctacctgcacaggaagtgagctgtgattcaactgatgtgttgagacatcgcacaagataaaggcttgcttatattgccttaaagcccagccctttcaaggtctttgaaaaaacggccatacctgcctgataccctcccatcaagggtgaacactacaactgtggcgagcgggcttgtcccgcgttgggctgcgaagcagccccagcaccagcggcctaagaatgcctggttcagcgcatttccccttccagggtcgcttcgcaacccaacgcggggcaagcccgctcgccacagaagactcatcgcctgttctatctgaagaccttgaaagggctgacctcagtgccgaaacttttctggatatttcaaaatttcactttccttccccctctgaaatattgcatggttgtacgacgacttaccccgtcgtgccagcccccaacaacaataaggaaacacccatgcaaaacgtcaaagtgctgatcggctttctgtgcctgttcagcggctatgtcgcagcagcgcctgcccctgccgaaaaggacgtggcccaagcggtcgaccaactgacccaggccatgctgcacctggacctcaagcaacttcacgcgctgacgtccgacaagctcacctacggtcactccagcggcaaggtgcagaacaaagaccaattcatcgctgacctggaaacccacaccagcgcgttcaagaccctggaaatgcagaaccagaccatcaccctgcaaggcgacactgcactggtgcgcaaccacttccacgctctggccgttaacagcggtgtagaagtgcccaccgatatcgacaacttccaggtctggcagaagcaaaaaggcaaatggctgctgatcggacgccaggcctacaagtactgatgcccagcggtgagccgctgaccccggctcaccacgccaccaccgtgcgcaccttcaacaacgcctcacgcagcgccggcagcgccaccgagcccaaggccaaacgcaacgcatgcggcacatgggtcgacacggcaaatggctcggcggtagacacggaaatgccctcgcgctgcaagctcatggccacctgatcggcccgcgcctcgtccgccaggggcaaccacaggaaatacgaagaaggatggctcacgtacgccagtcccttcagcacctgcgccgccaaggcctgccgcgcctgggcatcctggcgcttttgtgcttccagttgcgccaccgtgccatcctccagccaggccaccgcaatggcgctcatcacacccggcacgttccaggtggtggccatgagggtgcgctccagtggtttcacccattccatcggcgctgcgacaaacccgacccgcaacccggtcgcgacacttttcgacagcccgcccacatacaccgtgcgctccggtgccaatgtcgccagcggcggcggcgcgtcttcggccaggaacgcgtaggccgcgtcttcaatgattatcaggttgtgctgacgggcgatcgacaccaactgctcgcgctggctcatgcccatcacccagcccaatggattgtgcagggttggcatgctgtacaccgcgcgcaccgggcgcttgcgacacaggttgtgcagcgcgtccaggtccggccccaccggcgtgaccgggatcgcgacgatttccaggtgcagggtttcggccagcaccttgaaccccgaataggtcaaggcatccaccgcgatcacatcgccgggcttgagcaacgccatcagcgtcaccgccaggccgtgctgggcgccactgaccagcagcacctgctcggcgtccaccctgagcccgcgactgagtaagtgccgcgcaaccgccgcgcgctcatgcaagcggccggcatggggctggtaacgcaacagggcttcgaggtcgccgcagagcgccaactggcgcagcgccgtgcgcaacctatccgcctggccgggcaacgaagggtaattaaagttcaggtcgagcatgcccggcgccaccgtcatctgcccactgccctgccccggcggcagcgagatttcgcgcacgaaggtgccgcgcccggcttcaccgctgaccagccccatcccctcaagctccgcatacacccggctggcggtgactagggccaggccatgctcggcggccagttgccggtgggttggcagccgtgtgccgggcggcattgttccgctgcggatggcttgggcaaaggtatcgaccaacgacttgtagcgggcgcggggcattgggctgtatccatgacaattttttgattgtattaatcctcacctctaggatggctgcaacgcaacccctccttgtccggacgcctgatcatgcaacgcacctcctctcttgacaccctgaatggcagcgcccaaggctggatcaacggctttatgggcgtggtgatcttcagtggctccttgcccgccacacgcctggccgtaatggagttcgacccggtcttcctcaccatgattcgcgcggccatcgccgccctgctgggcgtactgctgctgtggctgttcaaggaaaaacgccccacacgccagcagtgggtgcccctggcaatcgtcgccctgggcgtggtgatcggcttcccgctgctcacggccctggccctgcaatacgtgacctcggcccactccatcgtgttcatcggcctgctgccgttggccactgcggtgtttggtgtgctgcgcggcggcgagcgtccgcgcccggtgttctggctgttttcgatcctgggcagtgggctggtgatgggttatgccttcgcccagggtttgagcgccgcaccggccggcgacttgctgatgctgttggcggtgctggtctgcggcctgggctatgccgaaggcgccaagctgtcgcgcagcctcggcggttggcaggtgatctgctgggcgttggtggtgtcaatgccggtggtggcgccgttgagcctggtgctggcgccgacaagtttgcacggcatcagcctgcccgcctggctcagcctgggctacgtggcgttgttcagcatgctgatcggttttgtgttctggtatcgcgggttggcccagggcgggatcgccgccgtcggccagttgcaattgctgcaacccttcttcggcctggcgctggcggcgggcctgctgcatgaacacgtcagcctgggcatgctgctggtcaccgtcgcggtgatcggctgcgtggccggtgcaaagcagtttgcccgctaacgctgcggcgcgaccatcttgaacttgatgttgatgtcattggacaccacgctgttgccggcccactcgccctcgccgatcctgaagtcgccgcgcttgaggatgaactcaccgtcgaacacaccaatgccgctctgctccttgagcaccacgtcgacgtccaccgggcgcgtggtgcccttgatggtcaggttaccgctgatctggtagcggttattccccaacgccttgaccccggtggattcatacacgcccaccgggtaggtcgcggtatcgaaccaggaggcgcgttgcagttcgtcgttggcatccgggctgccggcgtcgatgctggcgagctggatcttgagcaaggcatgcccggcttccggctgttgcgtatcgaaggtcaaggtgccctcgaagtcgctgaacgtgccatacacccgctgccccaattgcttgtaggtgaagctgatctggctggcggtgcggttgacgtccttgtactccaccgcctgggcgctggcgccgtaggcaaggatcaaggccaggacggcgaccggggacattcgacgtttcatgcaacgctccgcgacaggtaagaacacagtatcgagctaacacctcataccagggatttattcccatcgggcgtttgtcctgctaaacagagtagtcgccccacaacaataaggacgctgcatgcacgccccatcgctccaggacaccaccgcgccggaaggcatctgctacggctgcggcgccagcaacccccatggcctgcacatcaagagccgctgggacgcggacggtatccacctggtcgccgagcacctgcccgaggcaaagtacaccggctggcccgacctggtctacggcggcctgatcgcgatgcttgtggactgccattccaactggaccgccatggcctaccattaccgcgccgaacaccgcgaacccggcagcctgccgcgcatcgattgcgtgaccggcaacctgggcatcaagttcatcaagccgacacccatgggcgtcaccctcaccttgcgcgcccgcgtcgacggcgacgtggggcgcaagacccgcgtgatctgcgaggtgtacgccggtgacgtgctgaccgccgtgggcgactcgatcttcgtgcgcgtcgacaccgaccaactggccgctgccgcccatggccgtgacagctgatcctggtctacattgatggccaccgttaatcgaggactgcaccgatgactcatctcaccgcgaaagactttgcgcccgaactactggagctctacgacggctacgcccacggcaagctcaaccgtcgcgaatttctcgaccgcgccgccctgttcacctttggcggtctcaccgcctcggccctgctcgcagccctgagccccaactacgccctggccgaacaggtgaaattcaccgacccggacatcgtcgccgactacatcacctacccgtcacccaaaggcaacggcagcgtgcgcggctacctggtgcgcccggccaaagcggcgggcaaattgccggcggtggtggtcgtccatgaaaaccgtggcctcaacccctatatcgaagacgtcgcccggcgcctggccaaggccggctttatcgcgctggcgccggatggcctgacctcggtgggcggctaccccggcaacgacgaaaaaggcgtggaactgcaacagaaagtcgacccgaccaaactgatgaacgacttcttcgccgccatcgaatggctgatgcaccacgacagcagcaccggcaaggtcggcattaccggtttctgttatggcggtggcgtgaccaatgcggcagccgtggcctacccggaactgggggcggccgtatcgttctacgggcgccagccggaagccaaggacgtatcgcgcatcaaggcgccgatcatgctgcattacggtgagctggacacgcggatcaatgaaggttggccggcgtatgaaaaggccctgaaagcagccggcacaacctatgaggcgtacatctacaagggggccaaccacggttttcacaatgattcgacgccgcgttatgacgaagcggcggcgaacctggcgtgggaacgtacgctggggtggttccgcaaatacctggcctgactgccccctgtaggagcgacctcagtgttccagtgcatagcgccggcaatggttgaggtagccctgctcatggctccctaccagttgcaccacgctggtccatagccacgacggcgcatccagctgtttggagcggttctcctgcaataccgccatccagtccttgcgtgtatcgcgatccatctgccgggcatgggcgataccgaccacccgtgccaggtaaccggcggcgtgcatggcgtcgatctcgctcaactcgtccagttccagcttcatatcctggggcaacagttcacggatgaaaaaaccattgtccagcatgcgcgtcgccaccatgcgttcacccaaaccaggcgacagctggcgggcgccctccaccacccggcggccattgtcccggggcatcttcgcccgtgccgcacggggcgccgccgcgccgacggcctgtttgatatcgatcaggcaatattcctggtcatccttgtcgcccacgccgagcaaggcggcataacgctgcaggcccagggagctgcagcccttgacccaataggccgagtccagcaactcgaccctggcgtccttggggcggcctttgagtgacgtcaccaattgatggatgtcggccgaggcgcagagcgtttccagtgcggttttttcggcccgtgacagcgaccagaaatgcttgcccaagggaatgctcgggcgagcattttcgatgcgctcacgcgccaggttcttccaggtgcgctccaccgcgctgcgcatgcccgccttgacctgggacgggcgcggcggcgcggcgtcgggcttgtctttgaacgcctgttcgtagcccaccatcatttcttcgagcatgcgcgcactggtaacccccggcaggtccgagccgcgcgcagcggtggccagggacagcgccaggcgcaccaggtcgtgggccgggttgccgatcaccgtctggtcaaggtcgcggatatgcatatcgatgcggcccttgatatcgccggtaggccccaggttgccggcgtggcagtcgccgcagatccagatcgccgggccatggggcaagcggcgcccgctctggctgtgcagccattcgtagaattgcacggtgctgccgcgcacgtaggcgtgggcagagcgggccattttcaggttacgtagttgggtcaggtgcggcaggcgggcggaggggcgcggtatcttcatggaaaaactcagtgcaggtgttgcgatagagcgctggccctcgacaaatgtttcattatgtttcaaaaaaaaacgtttcaatcttccgcagccatgtcccgcaaccagcctttgaacgccagcatcgccgccgtctcggctcgcgactgcaagcgcgtcaaccagtaactgccggtggtgatgccgacatcgaacggctggcgaatcacatcactctccagttgccgcgcaaacatcatcgccggcgccaaggccacgccgaggccttgcaaggccgcctccatcatcgccagcgaagaatcgaacacaatgctgcgcggcagcagggtatcggcgggcaagccggcggcctggaaccacaggttccactcatcggcgcggtaggagcgcagcaaggtgtgtttcaagaggtcggccggtgcgcgtaattgctcggccagttgcggcacacatagcacgctgagcggagcttccagcagttcgcaggcatccgtgccgtgccaggcgccggcgccgaaacgaatggcgtaatccaggccttcggcggccacgtcgacacggttgttgtgggtcgaaaggcgcaggtcaataaacgggtagcgctgctgaaaatccgccaggcgtggcagcaaccagccgaccgcgaaggtgccgaccgccccgacggtaaggacctcgcggtagtgcccgccctcgaactgaccgagggtgtgagcgatgcggtcgaaggactcgcgcaacaccggcagcagggtttcaccttcacgcgtcagcatcaggccgcgtggcaggcgcttgaacaaggcgacattcagttgcgcctccaggcttttcacctgatggctgaccgcagcctgggtcacgcacaactcgatggctgcccgggtgaagctcaagtgccgggccgacgcctcgaacgcgcgcagggcattgaggggcaaatgggaacgcagcatggtctaccctagattttctaatggcagctgcaagatatcatcgtttgccgaagggaccgaacctgactagatttgccacgcctgcgcaggccccgatcgtcagtgcatcatttacatggaagcgaataaccatgaactccaacgtaagaaatttcctgatttcagccttatttatcagctccggcacctgtatggctgccaccgacctgcgccaggtcgtggacagcagcgtcgagcccctgatgcagcagcaaggcatcgccggcctgtcggtggcggtggtgaacaagggcaaggtgcaatactttaactacggcgtcgccaacaaagacaagcaacagcccgttaccgaagacacgctgttcgagatcggctcggtgagcaagaccttcaccgccaccctcggcggctacgctgcggccagcggcaagctgaagttgtcggacatggccagccagcatctcgccgcactcaagggcagtgccttcgaccgcatcagcctgctgcaattggccacctacacccctggcggcctgccactgcaatttccggacgccgccgacagcgccgacaccatgctcgaatatttccagcactggaaacctgtctatgcgcctggcgcacaacgcctttactcgaatcccagcattggcctgttcggctacctcagtgcgcaaagcctgggccagccgttcaacgtcgccatggagaaaaccctgctgcccaagctgggcctgaaaaacacccatgtcagcgtgccgccagacaaaaaccagacctacgcccaaggctacgacaaggatcagaaaccggtacgcgtcggccccggcgcgctggacagcgaagcctatggcatcaagaccagcagtcaggacctggcgcagtacgtgatgctgaacatgcacccgcaaaccctggagaaaccgctgcaacaggccatcgccaccacccacaccggttactacacggtgaacggcatgacccagggcctgggctgggagtactacccctacccgatcacgctgcaagcgctgatggaaggcaactccacaccgatggccatggagccgcataaggtgaaatggttgaccccggccccggcccaggtgcaaccggccaacgtgctgtacaacaagaccggttcgacccgtgggtttggcgcctatgtggcctatgtgccgagcaaggacatgggggtggtgattctggccaacaagaactacccgaatgccgaacgggtgaaagtggcccatgcgatcctgagtgcgctggaccactgatgcacacgccctgcaggagccggctggcgggctcctgcaagttgggttacatcccgagccagtgcggcaacgccagcgaaatgaacggcaagtacgtgaccatgatcaggaacaccaacagaatcatcagccacggtagcgccgcgcggatggtctgccccagcgtcaacccggtcaccgccgaggtcacgaacaggttcagccccaccggcgggtgcaccaggccgatttccatgttcaccaccatcacgatccccaggtgaatcgggtcgatacccagcttcatggcaatcgggaagaaaatcggcgccaggatcagcacgatggccgacggttccataaagctgcccgccaccagcagcaccacgttgaccatgatcaggaaaccaatcggcgtcagcccttcggagatcacccatgcggtgatttcctggggaatctgctcggtggtcagtacatgggcgaagagcatcgcattggcgatgatgaacatcagcatgatcgccaggcgcccggattcgagcagcaccttgggacagtcgcgcagcttcatgtccttgtagacgaacaacgccacgaacgccgagtacaccgccgccaccgcggccgcttcggtcggggtgaacatgccgctgtagatgccgccgaggatgatcaccagcagcaacaggccccagaaggcgcggcgcgcgcaggtcagccactcgcggaacgtggcccggggctgggccggcagcttcttgatgcgtgcgacgatgtagatggcgatcatcagcatcaggcccagcaacaggcccggaatcaccccggccatgaacagcttgccgaccgaggtttcagtcgccgccgaatacaccaccatcacgatcgacggcgggatcaggatgccaagcgtgccggcgttgcagatgatccccgccccgaactccttcgggtagccggaacgcaccatgcccgccacggcaatcgaacctaccgccgccacggtcgccggtgacgaaccggacagcgccgcaaacagcatgcacgccaacaccgccgcaatcgccaggccgccacggatatgcccgacacaggcgttggcaaaatcgatcaggcgctgtgccacaccgccggtggtcatgaacgcgccggagagcaggaagaacggaatcgccaggaaggtgtaggcgtcggacgtctcgaacagcttgatcgccagggagctcaccgagtcctggctgaacatcaggatcgacaccgcaccagacaaacccagggaaatcgcgatcggcacgccgaggaacatgaacacgaacaacaacagaaacagacagagcacggccatcagtgacgctcctcatggctgccggccaacttgctggcctcaccggcctcatcagccagccctaacccgacctgacggtgggtaaagatgcggtagaaaatttccaggtagcggataaacaccatggcaaaaccaatgggtacgatgatcacgatgtcaccgacgtcgatgccgtactggtcgaggtcttctgcgccgatatgcgcggtcatcaccgcgctgacccacttgtagctggcgatcatgaacagcccggcataggccaggcagcacaggcaggcaagcatgcccagcaagcgttgcaccgggcgcctggtcagcttgaccagtgcgtccacgccaaggtggccggcggtgcgcacgccgtaggaaataccgaagaaaatcagccagccgaacatggccttggtcagcgccacgctccaggtcatgtcctgggcccaggtcatggtgtggtcgcccagggcgccgaagaaggtgctgctgaaggcccacttgtcagacagggcaaagaacagcgtgtagatgttgttgagcatgacgtagacaaatgtcaccagggtcatggcggccagcaggaaggcgatgaaaccttcctccaggtgctcccagacgcgccttagcgtttgcatggcaaaacctcgcgaaagcaaatgagatgtcagggtgaaaaccggatcgataggtgggagggggcttgcccccgatagcggtgggtcagagacagatgagcaagctgacacaccgcaatcgggggcaagccccctcccacactgggggattactggttggacgcgtccgccgccttgatcaggtccgcgccgatctcaccctcgaacttctgccacaccgggcgcatggcttcgcgccacagctggcgttgctccggggtcagttcgatgatttcgctggtcttggcgtcgacgatcttctgcttggccgactggttcagcgcttcggcctgtttgttcacctcgacggtgacctcgaccatgatctgctccagggtgctgcggatgtccggtggcaggccgttccagaacttggcgttggtgatcaccatgtagtcgatcaggccatggttggactcggtgaagtacttctgcacctcgttgaccttctggctttcatagttcgaccaggtgttctcggtgccgttgacggtaccggtctgcaggccctggtacacctcggcgaagctcatcttgcgcgggttggcgcggatcgccttgaactgctcttccagcacgctggaggcctgtacgcggaacttcaggccacgggcatccttgggttcatgcagcgccttgttggccgacagttgcttgaggccgttgtgccaataggccaggccgaggatgttcttatcctgcatcgaggtcagcagcgccttgccctgggccgcctggaagcggtcaacggcggccaggtcgttgaacaggaacggcaggtcatagatctgcacctgcttggtgtattgctcgaacttggccagggacggcgccagcatctgcacgtcgcccagcagcagcgcttccatttccttgccatcgccgaacagcgacgagttcgggtacacctcgaccttcaccttgcccggcaggcgttcttcggcgagcttcttgaacaacagcgcgccctggcctttgggggtgttttcggccaccacgtgggcgaacttgatcacgatcgggtccgccgcctgggctaggcctgcggcaaacaaggtggcggcgcacagcagcgcccgggagagcttgagcatggaaaatcaccttcttattgttgtgttgtaaggcaaggtgcctgatgtgacgcgtgtagtgaatttcgaattttagatacctgcgttcggcgtggccgaacgctacgcctgggccgccaacaacctttgcgcgcgcagcaacaccggcgcatccaccatctgcccatcgatctggtaggcccctgccccatgggcgccggcgtccaccacccgctgcgcccaagccaggtctgcggcgctcggtgcgagcgctgcatggatcaccgccacctgcttgggatggatacacagcgccccggcaaagcccatttcataggcatgccggatcgaacggcgcaggccttccgggtcatcgatggccgggtgtacaccgtccaacggcgcgaccagacccgccgcccgcgaatgcacaatcagcgccaggcgcgcctggtccagggcgaactgcgcagccgcggagttgctgctcaggttcaggtccagcgccaggtccagcccgccaaacgacaggcgctgcacctgtggcgcatgggcgatctcggccacggccagcaagccacgggcgctttcgataatcggccagatcactttgccggtggcggcaaccaccgccacttgcgcggcactttcaaccttgggtagcaatacccccgccacattcggatgggctttgcagaacgccacatcctcgaaatgctcggcatgctccggcgcattgatgcgcacccacacctgggcagcggggttcgccgtcaggaacaccccgaggttatcccgcgcctggcgcttgagcggttcttcgaccgcgtcctcgaaatccacgatcaccgcatcggccccactggccagggctttggaaaatcgttccggtcggctaccgggtacaaacaacgccgaacgcaccaatggctttggcatcacagaattccttatttagataacgccgcgtgcacgcaggctgtcgatggcatcgccggagtaaccgagccggtcgagaatgccctggctgtgctggcccagcgccggaacgccgtccatgcgcggggtaaacgccgcattgcgggccggcggcaacagcgacggcagcggaccggccgggctatcgacctcgcgccagctgtcacgggccttgagttgcgggtggtcccatacgccctgcatatcgttgacccgggcgctggcgatctgcgcgtcctccaggcgttggatcaccgcctcggcatccaactgcgcaaagctgtcgacgatgatctggcgcagcacctcacggttcgccgagcgtttgaagttggcgctgaaacgctcgtccgtcgccaattcaggcgtgagcagtaccttgtcgcagaacgccgcccattcgcgctcgttctgcaaaccgagcatcaccgtgccgccatcgccggtgggaaacgggccgtagggatagatcgtcgaatgcgcggccccggcacgcggtggctgcggggcgccgtcgaaggcgtaatacatcgggtagcccatccactccaccaggctttccagcatgctcacgtcgatgcggctgcccttgccggtcttgccgcgcagcagcagcgccgagaggatgccgctgtaggcgtacatgcccgccgagatgtcggcgatggagcaaccggccttggccatctggtcgtcgccagggccaccggtcaccgagagaaaaccgccctcgctctggatcagcaggtcgtaggccttctttttctcgtacggcccgccttcgccgtagccggaaatatcgcacacgatcagccgcggaaagtgcgcatgcagcgcctcgaacgacaggcccatgcgcgccgccgcgccaggcgcgaggttctgcaccagcacatcggcgtcggcgagcaaggtgtcgagaatatcgcccgcctcgtcctgcttgaggtccagggtcaggctttccttggagcggttggtccacacgaaatgcgaggccagaccgcgcacgcgttcgtcgtagccacgggcaaagtcgccgacgccggggcgttcgatcttgatcacacgagcgcccaggtccgccaactgacgggtgcagaatggcgcggcaatcgcatgttccaggctgacaacggtgatgccgtccagcggtcttgggttagtcatgacagttcctcagagccagtgggccatggacgtggcgttgcgcaaatcccagaccttgtcgatcagtgcgttggcctgggccggtgtgcgggcgttgctgaattgggcgaggcgctggaatttgtccgccagctccgtgcggctcagggtgttgcccggatcgcccttgggctcgtcgatggcgccgtgcagtgtgcggccatcctgcgtggtgacggtgacacggccgagccagcgttgcgggtaggcgccgtcgacttcgcggtcgaggctcatgctgaccttgtcgcgaaaagccgacacggccgggtcggtcaacgccagctcatggaactcggtgagcccggccttgccgtgtacggcaatcaagcccagcacagtgcccatggagaacttggcctggtgcacgctggccggtacgttcacgcgccccagtacatcgatggcgccctgatgcacgcgggtttccacgcgggcaatatcggcggcggcgagctgttcgcgctgcatcagctccaacagcgcatcggccgcaggatgggtatggcggcacgacgcatgaaacttgaacgaggtctccagcaatgcccagcgactgcccaggccggcggacaacttgcccggctcggcatcactggacatgcccgccgccagcccttggtcgccctcaagaatattgcgtgcaccggtcagcccatccgccgtcaggtaagcggcgagcaacccgtccgctgccgccttggccgtgtgcagctgcttggagtcggcggcatcgcgcaggaactcccacaacccggcggcctgggtgcctgcgctgccgagcaggttgatgaattgttcctggttgaaatccagcaacttgcccaccgccaccgccgccgccagggtgccgacggtggccgtggtgtggaagatgcggtaatgggagcggcccatgaattccccgatgcggatacccgcctcgtaaccggccaccgaggccagcagcaagtcgcgcccggatttgcccaggtcctgggcggcggccaaggcagccggaaataccacggtcgccgggtgcaacacggagctgttgtgcaggtcatcctgctccaccaggtgcgatgaagcgccattgaccaacgcggcgaagtaggcgctgctgctggtgccattgacgatcacctgggccgggccgctgctcggccccatcttccgggcatagcgctcgaacaacggaatcgggtgcgcccctttactcgccagcgccgaggccagccaatccaggtacaggtcttcggtgcgcgcgaggacggtttcgggcaactgtgcgtagtgcagatccgccaggaaccgacataaggcttgggtatggctcatggtcggcccctcagaagctgcgtggcagttcgagcaggtgctcggccacgtaggacaggatcaggttggtggagatcggcgccacctggtacaggcgcgtctcgcggaatttgcgctccacgtcgtactcgcaggcaaagccgaaaccgccgtgggtttgcaggcaggcattggccgcctcccaggacgccttggccgccaggtacttggccatgttggcgctggcgccggcatgcttgccgctgtcgtattcctcgcaggcgcgccagcgcatcaggtctgccgcttcgatctcgatatgcgcctcggcaatcgggaactgcacgccctggttctgcccgatgggccggccaaacaccacgcggtcacgggcatacgcgctggccttctcgataaaccagcggccatcgccgatgcattcggcggcgatcagcgtgcgttcggcattgaggccgtcgaggatgtatttgaaacccttgccctcttcgccgatcaggctgtccaacggcaactccaggttgtcgaagaacagctcgttggtctcgtggttgaccatgttggcgatgggctgcacggtgagcccgttgccgatggcttcgcgcaggtcgacgaggaagatcgacatgccttcggatttcttcttcacctcggccaacggcgtggtgcgcgccagcaggatcatcaggtcggaatgctggacccgcgagatccacaccttctggccgttgatcacgtacttgtcgccgcgcttgattgcggtggtcttgatcttggtggtatcggtgccggtggtcggctcggtcacgcccatcgattgcaggcgcaattcgccgctggccagtttgggcaggtagaagcgtttctgcgcttcgctgccgtgccgcaacagggtgaacatgttgtacatctggccatgcacggtgccggagttgccgccgcagcggttcacttcttcgaggatgaccgaggcctcggccaggcccaggccggaaccgccgtattcctcggggatcatcgccgacagccagccggcgtcggtcagcgccttgacgaaagcctcgggaaagcccttctcttcatcgatcctgcgccagtaggcggcatcaaattcagcgcacaaggcgcgcacgccttcgcggatggcgttgagttcttcgttgtcattcgggttcatctgcggctctccgcctgttgttcttggattattcgaaattcacctgggcttgctgcgccaggccatcgctattgccagcccacagttgggcaacgccggtttcggtgacgcgcccgcccacttcgaagggttgcggcgcaatcaatgggcgcacaccgcgataggcaaaccggcgcaacgtggcgtcgggatgggcgcgacagaacgcacgcaagttcagggtggcgatcagcggcccgtgcaccaccagcccggcatagccttcggtgccggtgacgtaggggtagtcgtagtgaatgcggtggccgttgaaggtcaccgcgctgtagcgaaacagcagggtcgccgtggggtcgacggtttcgcaccactcgccctgctccagcgcctcgccgctgcccgatttgggcggcgtgggttcgcggtagacgatgtcctgttcctcgcggatcgccaggcggcctgcctgggagtagtcgtggcgcacggtgacgaacagcagcgagccagtgcgcccggtcttttcttcgacctgggtgatggtcgacacccgggtcgccgcctcaccggcacgcagtgcatgcaggaactcgatgcgcccaccggcccacatgcgattgcggttgtcggccggcggcaggaagccgccacgggccggatgaccatcaccgcccagagcggtttccggcagtgggtcctggaagaaacaccactgccacagcggcgggatatccgcgccgtcttcgggcacggcttcgccaaaggtggcggcaatacgcttgagcaggttatggctgaggtggtcgtgggcggtttcgctacggccgatccaatcggtggcgctcatcgggtgcaggtcctcgggcagtgagtgtctgccccggatcatgcaagggtgtacccgttccgggaatttgcatttcaataaaccagcgttcggttatgctgaacgccgccatcctgtcccgggagtcttgcatgcacttcgatctggccgacctgcgcctgtttatccacatcgccgaatcccccagcctgacccagggcgccaagcgtgcgttcctctcgccggccgccgccagtgcgcggatcaaggccctcgaaggccaactcgacacgcgcctgctgtaccgcgacagccgtggcgtggagatcaccccggccggagagcgcctgctgcaccatgcacggttgatcatgcgccaggtggattacctgaagagcgaattcacccaatacggcgtggattcggccgggcatatccgcatttttgccaacaccacggcggtcaccgaattcttgccggaggtgctggcgggcttcctgtcccagcgccccggcgtgaccgtcgacctgcaggagcgcctgtcccgcgacatcgtgcgcggcgtactggatggcaccagcgacatgggcatcatcgccggccccgtggaagcctcggggttgcaggtactgcacttcagcacggataaactggtgctgatggtgccggtggggcatgcgctggcggaacaaccctccgtcaccctggaacagaccctcgcctaccagcacatcggcctgcatgaaggcagcaccttgctgagcttcctgcgtgaacacgtcgagcggctgggcaagcagctgtcgctgcgcatccagatgtcgagtttcgaggcaatctgccgcatggtcgaagccggtgtgggcatcggcatcattccggagtccgccgccgtgcgccacagccgtaccatgcggctggtggcggtgaagctggatgaaccctgggcaatccgcgagcgcagcatcctggtgcgggagctggaggcgttacccggcaccattcgtgcgttgatcgccacgttgatgccggactcggtcagtgcaaactgaggttacgcagacgcgcaccgtccacggtgacatggctcaagcgcccctggtcgtcgaataacagccagccgtcctcggtgcgacggatgttcacttcgtaacgaggccagtgcagcaccgcacacaggtggtcactggcgcgatggataaagtgccaacgcgtgtcgcgttcgccggcaatatagccgaacaccaaccactgcgcgtcgagggcaatgcgcaccgggtcgccgtcgaagaaaccttcgtcacagcccggcatgcgataacccttgcggttgccatcgacatccaggatcagcgtcggctcttcgtcatcgcggcacctgatcccgtactcaatggtttgatcgagtgcacagtacagcgcgtggctttcctgcgactgcgtggacgccggctcacgcccggccaaccgacgctcaggcaagcgatagtgccagcgttcgacaccctcgcgcgggttgtagagccagaggaactcattacgttcgttgcctttgagcgcgcgcagcgcccccggcaagtcgctgacatgccacagggtctgaaagttgcgatccacgtccaccacgcgcagttgccggtcctgaccgagggtccaggtgctgccgtcaaactgctcggcgaacacctccagcacctgcacgcccaggtcggtggcggtacggttgaccaggtcgagtttgctgatacgccatacccggtcacgccgggccagcaccagcgccatctgccgactgtgagccaggacaatccgctgggccggcacggcgaagaggaacagtggctggccgctggcatccgtcaccaccgcaccggcctcgcccagcgccaccaggtaacgctcgtcatccagcgacactgcgtcgtatatcggtcggctaccctgggtcggggcggtccactccagcgcatcacccacccctaccaacgagcgtatggcaggccgcttcagggcctggccaggcaagtctgcctgcaacaatttatcgcggctcatcttgaccagcgcttgcagctgattgaagttcagcccgccgcgaccactgagttggtcggcgatcactgcgtgcacggttgcaccggccagccaactcagggcagcggcatcagatttgtgcgccaacagggcgtgcgccagggcgtcacgctcggcgtatcggtcgggagcgtcgcgcaactgttcgatccacggcccgtaagcttccagggtctgcggcagcagaatcgcgcgtttgaccaaggcccccatcgccagccgcccaccggccgcttcggcatccagcaaccattgcgccgcgcgcgtgcgctcatccggcaggctccacaccacctcgacggcttgcagccacaggcccttggcgatcagcgattcggcccactccaggcgcaaacgctcggcaatctgcggctgcctggcctggagcaacaccacggcatcggcaaacgcatcgtcacgccgcgccaccagtaaggcacgctgccagttctcggccaggcacagcagacgcacgatgaccgccgacggcatgtcccaggccagggccaggtcggcagcctgttggtaacgtgcgtgcttttccaggtagtcgagggcttcctggcgctccttgagcagttcggcgaggacaaataccgcttcttcgatccggttttcccgagccaggcgttcgtatgagcggcgatagacctcgcgcaggtgctcggtcaggctttgttcgaagtggtaggcgcggcctggcccgctctgctggctgagggtcaggtcgtcgcgccgctgcggcgtaccgaagttctgttcagcatccggctcctggcctcccagaggaatggcatggcgcaaggcttcggcaaaatcaccgtcctcgaacatctccagcatgcgctgcatgtaggcggcctggcgtttgccgtagagcctggacagttttgaaagctcggtcagacgggtcagccaacggcgccaggcggacggtttaagccgagccggtgtggcccgctcggcgatgcccggatccgccggtgccgaaggcgcggcgccgacgggctgcacgcctcgacgcaggtatttgttgatgcccatcaacaaggcagtgaacaccgttgcgcctagcaacatgcccaggatcacgcggctgatgtcttcagtggtcgaagcaggaatcggtgtcaggggttgggattggctgtgagtgcccatccagatcaacccggcgaccaacgccagggtggcgcccagtttcaacgccgggtactgcgcgggcgcctcactggcccatggctgggccgccttgggaggcgctgctttcggcgctggcggttgacgctccagcaacgcgcggatcacgccttcctgctcgggactgaccggcgccaagccgccaaggatctcacgcacatcggtgatgtccggcacgggcagctgcggcgcaaccggcgcatgacaatcgaaggtatcgagtaaggtgtaggcactgatctccagccacaacccaggctcaaggaccttggcgtcgcgcagctgcaaggcgtgcacctggctggcgcgcaccagccacaagtcggcggtgggtaaagcacgcagctcgtcagcggtcagccgtgccgaacacaacccacgcccctggcggaccagcggccagccgtctaaggtctggcaatcgagtgcgacgggcacgctgaactgcaacacatctccgtcggcaaaacggtaggcggcggcgcccgcgcgccagtgtccgaggatcaggcgagcccgctcctgcgtggtgaagcggtcagcaggcaaccacacaccgtcgatggactggtggccggtcagcagcggtcggcggatcagcaggggttcgtgctcatgcatgggcaggctcttgtttcaggtcgcacatgacttgcaaacgcatggcgcgctcggtgacgttgaacaccagtagttcccgggcggtggtcagcaccgccaccagcccgctcatggggcagaagctggcacgggcaatcggtgcggaggtggtgaacagcgtctgttgcagaccttccgagtacaggccgacggtgtgctggttcgggcccagcagtaccaatgcatagcactcctgcgcggccacatggtgatgcaggccgatagcactccagcccggcgccaagtcgatctgcgcccttttcgcggggaagctgtcgtgggtcaccaggcgccaactctggcggccatcatggtgagtgagtaatgcgcacccgccaaaggtgtacttccagtgggaggtgctggcgaacagtacctggctgaccccggccgctgcaccgaccgcatagccggaactgcggacaccagaggccgttgcggggtacgccaccagttgcccggcctcgctgcgggcgtagaccaacgacaaggcatccagctgcgccaagcctatgacattgttggttaccgagaaaaacgcgcccctcggtccatgaccgggacgctgccagtgggcgagctgaccatttgtatcaagcacatacaggcgttccgcttgttggccgcgcagccacaccgcgggcagcaaggtcgcggtgcccggtggcaggtgcagctcttcgcgtgcaggtttgttggcggaaacaaggccggggatattccagaaggtcaggatgtggccatcaccgagcaccgcaccgaggctgcgataattaaacgcggcggcaaacacatgctggtgtttgccccacaggcgacggcgtacctccagggcttttttctggtttttgtgcggcagcttgatcaccaccatgccgtgttcgtcgagcaggcgcagggcgacatagttgccggagccggagatgaccggtggcaatgtcaaagccacccgcgccacccgcccggtggcggtgggcggcggggtatgcgcggcgttatcgaactggcccttgagcaggcgcaccgcctgttgctcgtcgggcatgggcagcgacacgcgtcgtgactgcaaggcaaaagacagactgcgtccgtccaggttgcgcgcaatctgcacgcggtgggtgcaggtcttggaatcggtaggcggcaagcgctggccgaccacccagcactctcccacccgatgttcggccaaggcgtcacgccaagccagccaatgggtgtcgctcaccacctcgtaggtgcgggcctcgagcaagcgcttgagttgcgccgccgagtccagctcatgcaacaccggcgtgccctgcagaatgccccagcgcaattgcgcccccgcctcctcggctcgccgcgccagcaatatcagcagcgccaggtgtaccaggcgcgcgacgcccaattgcaggggtccggcgtcgaacaacaccacgatcagacggttcgccgcctgggcgcggtactgtggcgcgaggaacatatgctcgccgccgaccgcccggcgcaggaactcatcgggtacttcatcggccagcagccattcgctggagagcagccgctcataggcaccgcgccggtgcaggtcgcccaggccgtcgggctccggcacaccgccctggtgcaggcctcgcagcggtcccaacagcgggttgaggcggcccagcaggtcggcgaacacgggtaactgttccggggcaaaccattccagccagtgccgccagggttgcagcgactcaggcagttgcatgagtgactccccaataatcagcgatacgttgcacaagggcaggcgaaacggccagcaagcggtccaacgggaccacggccgcaggctcatgccacaccagcaggggcgaacgcttgaagcgtgcggaaaaggcctggcccagcaggtcttggggcacatccggctcccagctggtcggcaaccagaggtgtggcgcgctcgcgctgggagccgcgtaagccacgccgtcgacccacggcagatcagccgtcgagccggtcaccaccagcacctcaccgttggccgtggcgtgcagacgcgcggcgtgttcaggctcaagcagcgccaggcgcctgagcatccggcgtgccgcatcaccccaggccacggcggcttgcgcctcgacgggtgcctggcgtgagcgccagcgccaaggatgggtcaacgcactcattcggcaggtatcagcaaacgtgtaagttgcccccgcgcctgctgcaacggctcgggcatcgtctggctgttgaagttcgcatcaatctcgcgcaacaacccttcgagcgccgtactggtcggcggttcgctacgggcgagatagtcttcggcggtttccagcaggcgattcagacgtgacatcggctgcaacgtagcctcttccacggcgctgaacagatggctgttgctggacgcggcaaacaggtcgcgcaacacctcacgcccctgttgttgggtggcctgggtcggcaacacgtacagcagcggccacaggtcagcgtcgctggcttcgaggcggccgctgagcaacgcggcggcggcgatcaggcgttgggatttgacgatgcgtcggtcagacaactggatgccggcttcacgcagacgacgaaccgcctgggccagggcgggacgcacggcggccaggtcgacgtttttcaacgcatggccaagcgtgtccagttgcgtgaggcccagcaactgctgcaccgggcgttgctccgactgccagccaccggccagcatggcctccaattggttgtccggcaccgactcgacaaacaggtgcaacaggaaacgatcaccaaaggccgccagcgcttcatcatccggcaggccgttggccgcgccgacgcacacccgcagcgggcattgcacctgggtgtggccacggcggaaacgccgctcgttgagtacgccgagcaaggtattgaggatcgcggtggagcccaggaagacttcgtcgagaaacacgatgtcggcttccggcagcatgccgctgacatcggtttccaccgtgccttcgcgcagctttttcaggtcgaccgcgccaaacagttcggacggttcggtgaagcgcccgagcaggtactcgaaatagcgcccgcccatcgactgcgcaacgcgccgcaccacggcgctcttggcggtgccgggcggcccgatcaccaggatatgttcctgggccaccgccgccagcacgatcagttcggccaattgctcgcgccccaccaagccctcggttgcggcacgtacagcatggcggatttgcgcggcagcgctttgcaactgagcaatcatgggcgtcttccctgaaaccaaagcgctgaatcttgcctgaggctaaggtattagcaaagcgttgttacataccctgatcaggagtcagcccatgcagctcgaaggatcctgccattgcggcgccgtcacattcagcctcaccagcgcccacccctacccttaccagcgttgctactgctcgatctgtcgcaagacccagggcggcggtggctacgcgatcaacctggccggtgacaccgcgagcctgaaggtgcgcgggcgcaaagccatttcgatctaccacgccaggctcaagcccgaaggcgccagccgcgcccatgcgagtagcgccgagcggcatttctgctcgcaatgcggcagcgcgctgtgggtgttcagcccggaatggccggagctgatccacccgtttgcctcggccatcgacacactgttgccggtaccgccggaccatacgcacttgatgctggcgtcgaaggcgccgtgggtggagctcacagtgcgcaagggtgacctgcagtttgacgagtacccgcaggagtccattgcgcagtggcatgagcggcatgggctggcgcgttaatcaccacagaatttttttgccataaaaaaaacaagcctcaggtggacaagcgaaattgacagattgtagattggatacagttgacaatctaaaagcagtcccaccacaacaaaaaaggtacttgaaatggcaatctggaaaggcgttttccccgcagtcaccaccaagctgaccgaggatggcgaggtcgatttggcggcaacccaagccagcattgatcgactgatcaataatggggtttcaggcgttgttgtcctgcctatgctgggcgagaacgcgtcaatgagcatgcaggagcgcgaatcagtcattcgcgcggcggtcgaggtcgccgacgggcgtgtgccggtgctgtgcggcctggccgaaatcaccctgcaaacggccaggaagcatgcggcgctgtacaagcgttttggcgcccaaggactgatggtgtttccaagccttggctacaagaccgatcatcgcgagacggtggaatggtacaagggcatcgccagcgcaaccgacttgccgatcatgatctacaacaacccgatcgcctatggcgtggactgcaccccggcgatcctggccgacctggtggacacacccgagatcgtctgcgtcaaggaagaaaccggcgacatccggcgcgtgaccgacatgtacgtggccttcggcgatcgcttcagcatcttttgcggggtcgacgacctgatcgtcgaaagcagcgcactgggcgtcaccggctgggtgtcgggcatgaccaacgtgtggccggcagaatgcgtcaagctcttcaatctctgcgcccagcaacgcttcagcgaagcccgcgagctgtaccacatcctcaccccgtcctttcacctggatgtacacgtcaagctggtgcagtacatcaagctggccgagcacctggtctacggcgcgccggaatggacgcgcgcaccacgcctggcccttgtaggcgaggagcgcgaatacgtgatcagcaccgtccagaaagcgatcgatagcctcgccgttcgcggctgacgcaacgggccctttcgcctcgtcaaggggcccgctccgtcaaccatcatccaaccccttcacagccatttttcattgagcgagtcccgttatgtccattacaggtgagatgctgatcggtcagtcgaaggttcgcggtaaaaacggtcagatgtggggattcaacgccgccaccggtgagcccctttccccagccttcggcggtgccacgctggacgacctcgacagcgcttgcgcactggcaaatgcggctttcgatgcttaccgcgaaacgacgccagggcatcgtgcggttttcctggaaaccattgcgcgcaatctcctcgcgctgggtgatgccttgatcgaacgttgcatggccgaaacaggtctgccgcgcgggcgccttgagggcgaacggacccgtacggtcaaccagttggcgctgttcgcctccgttgtccgcgacggcagtttcctggaggctcgcgttgatcctgcatgccctgaacgcataccactgccacgcgcagacatccggctgcgcaacattgcccttggcccggtggccgtgttcggcgcgtccaattttccactggcgttttctgtcgcggggggcgataccgcctctgcactggccgccggctgcccagtgatcgtcaaggcgcactcggcgcatccaggtacatccgagctggtgggccaggcgattcagcgttcaatacgtgcatgcaatttaccggagggcgttttctccctggtattcgatacgcagcacagcatcagccaggccctggttgccgatcaccggatcaaggcggtgggcttcacgggttcgcaacgagcaggcatagccttgatgaatattgcagcggcgcgcccggagccgataccggtctacgccgaaatgagcgcgatcaacccagtggtgttgctgccccatgcgctggccgaacgcagtgcggcgatcgctgacaccttcgtcgcttcgctcatcctgggcgcaggccagttctgtacgaaccctggattgatcctggcgatcgagggcccgtcactcgcagcctttgagcacgcggcaatcaccgccctgagcgccgcacctgcgacaaccatgctgacgcgtctgatctatgacaattattgcgatggtgtcgaaaaactgcgtgcgcagtctggcgtagaactgcttggacgaggacgacaaggtgaaagcttccaagggcaggccgcgctgttcgccaccagcgcgcatgcgttcctgaaaaatacagaactgcgtgacgaggtctttggcgcctcatcgttgatcgttcgatgccccgatgcctccagcctgctgcaggtacttgaagcgctgggaggtcaattgacgatttccgttcacgccagcaccaacgactaccccgcactcgccgcgctgctgcccacactggagaaaaaggccggacgtattctgctgaacggtttcggcacaggcgtggaagtctgtcatgccatggttcatggtggccccttcccggcgacttccgaccctcgctccacttcagtaggcagcctggcgatcaatcgattcctgcgccccgtgtgttaccaggacttcccccaggctttgctacccccggcactccaggacagcaacccattagggctcagccgaaggatagatggcacagtgaaaccttgacatgtttcgcgctcatttactggaagcgtcctacactcgtgagcctgaggtatgatcgaccgatggggatctcaaatcctggatccattcacctgtcagtagttgaagaatgccgaagaaagagcctttacccaacctgcgcatcaaacgtcaaagcttgcctgaaaccctggcggaatcactgcgtgagcggatcctgaatggggaattcaaggaaggcgagtcgctgatccaagagaccattgcgaccgagtacggtgtgagccgcatgccggtgcgtgaagcattcaaggagctggaggcgtccgggctgatcacgacgcagattcacaaaggctccgtggtgaagtccattccccttgagcaaatcgcggagttgtttgacctgcgtgcgctattggaatccgagctattggaacgctccctgccgaaaatgaccgacgcacactttgcggccaccaaacaattgctgccgcaacttgaagccgcctacctcgacgatgacatcgcgcaatggggcaagctcaactggctgtttcatcaaagcctgtatgcagcggctgatcgtgtgcaaacgctggctatcgttcaaggcatcaacgttcagacggatcgatacatccgcctgcaactgttgctgaccgcggggaaaaaagaagccgaagtcgaccaccgcgagctactccacctgtgcgaaaaacgtgatgtcaagaaagcggttcagttcctgcgcaagcacattcagcgtgcaggttctgacctggtcacactgctcaagaaaaaacgcgataaagaaacccaggcttgaatgccagtggcgcccctccttggcggaggggcttgtccacttggctcaattgagttgaaacccatgcgccagcggatcgcgctcatccacaagaatagtgttgtgccccgtgacctgagcccaaccagcaatgctcggcatgatgcccgggaaagcacctacctccgtcgccgactcgacccgacaatcaaacagtgtgccgatgatgctctcgtggacaaacgtatcgcccaccttcaagcggcttcgggcgaccagttgtgccatgcgcgcagaagaacctgtgccacacggtgaacgatcaatggccttgtcaccgtaaaacactgcgttgcgcgcgtgcgcgcgtgggttcctgggtttgtcacaccacatcacatggctgatgccctggatacgactgtcttgcggatgcaccggcgccagcagcgcctgcgcggccttacgaaccagaggactcaaccgaataatttcactgacgtccattgaatccaggccatcccaaccggcttgcggctcgatgatgacgtagaaatttcctccatacgccaggtctatgttcaatttgcccagggtgggtacatcaagcgccacattagctgcgtggagataactcgcaacgttgtacaggcgaacctgctccactctcgtaccgtttttcacgtagtcgatcgcaacgcgcccggccggcgcctcgatggccaacgaaccctcgatcctcggcaccaccagaccggcttccagcgccgcagtcaccgttccgatggtgccgtgaccgcacattggcaggcagccactgacctcaatgaacaacacgccgatgtcgcaatcctcacgtgacgacggatacaagatgctgcctgacatcccatcatgaccacgcggttcgaacatcaacgcttgtcgcacccaatcatgctcgcgctggaaaatctgacgcttttcagccattgaaacattgggcagcaaaggcccccccgcggtgacgatgcgcaccggattgccacaggtatgcgcatcgatgcaaaagaacgtatgacgagacataggaactcccttttgaacgcgttagttgaaacggctgattgcatagggttcaaggtcgaccaaagagggtttgcccagagcaatatcgctgaccaagcgaccggttgtggccgcctgggtaagcccgagatgaccatggccaaaggcgtatatcaccgagggatggcgcgctgaggcgccgatcaccggcaggctgtcaggggtcgcagggcgatgcccggcccaacgggtaccgccctccgtacgcaacccgggcagatagagcgcggccagcctggccaaggcctgggagcgcttgaaattcgccggtgcattcaacccgccgaactccgcggcgccaccgaccctcaaaccacagctcaacggcgtggccacgaagtggcgctccgcgaagatcacctccctggacaagacgacacccggttcgggaagggtggtgttgtagcctcgctcgctttccagcaagaccttgtcgccaaggcgctgggcgagtaggcctgaccacgcaccggcggcgaccacgaccttatcggccgttaaccaccggccatcgacgagccccaccgacacagcgctaccctcaaggcccggccggataccacaggcctcggcgacctgaatgcaaagccccctggcaagcaatgactgacgcaacttatcaaccagggtcttggggtccctgacgtgtgaccactggggtgtgaacaccccgcgcgtgattgtccgacccagtgcaggctcgatttcacgtgcttcgttgccggtcaacgtgcgcacctcaacaccccacgctcgtttgaggccccactgcattgcgtccttgtcaaacgccgcttctttctcgtagaccgtcagggcgccgagttgtagcagctcttcgcgaagattgtgttccgcgagcagcggcagcaggtcgtcgtagacccgagcgttaagtgccgccaacgccgccgatatgcgcttgaactccgagggcctgccggcacgggagaaacgcagcagccacggtatcaacctgggcgcgtgccccggacgtatcgccaggggtcccaacgggtccgccagccatccgggcactttccacaacacgcccggcaccgcagctggaatcacttccgtgaccgcgatgcctccggcattgccgaacgatgctttgtcaccttcagggtcgcggtcaaccagggtgacgcggactcccgcccccagcagatgatgcgccgttgccagccccacaatgccggcgccaatgacgattacgtgcctcatgaatcgcacccttttcagatggaaaaaatgcacctttttgaaagcaatcatgcccgatctgatcgaccagaacgagcgcatgtagattggatacaataaacacaatctgtcaaccgtcgctgctgcgtctgccaaaccctgacacacttcatagtcagcaacatcttttttattagacacaaccaattgttttttaaggtttatttagaatttataggctgtttttttgaccttcaatgcaaaaaaccctgtttccccctctacttccgcgaataaacatttggtagatttttcgacagatgtagattggatacaacgcataccaacgccacacccctaaaaaatacaatgccaatcagatcggggatttccatgaacattgcacgtcacgcaagcacctctctcctgctcgtcctcgccacaaccgcttccatgaactcagccggcgccggttccaccctggaccaggtcatttcatcaaaaaccctacgatgcggtgtgcaactcgactacccgccggcgggttttcgcaaccaggccaatgagccggagggatacgacgttcagtactgcaaggacatggccaaggcccttggggcaaaggccgtgattgtcgagacaccttcctccgaacgtattcccgcactggtgtccaatcgcatcgacgtgctgattgcttccacctcgatctcaccccagcgcgccatgagcgtgaatttttcccagccctacgtgaactacaccaacgttgtactcacccgcaaagacgccaacatcgaacgtttcgaggacctgaaaggccgcaacatcggtggtgtcacaggcaccacgaccgagcaggaactgcaggcgctacgcaaaggctgggatgacccgaacggcagctatacggggttcggcagcgaagccgaaggttacctggcactggcccagggcaagatagacggcgtgatcatcgggaatgcatcggcggccgcactggttcagagcggtcaatttcccacgctcacgatcaagggagtagcacctacgcctcccgacctgtgcggcatcgccgtcaaaaagtcagacccgcagatgctcaattgggtgaagaccttcgtatggacccaagtcaagaacggtcgctaccaagaactgtatgcgcagtacttcggtgacggcgaggcgcctttgctgacagttgccggcgtggactactaacctcaccttccgagcggccggccgcggccgctcctgcctggagcctgcgctatgttcgggtacacgttttattggtcaatggtctgggagaagctccccgagctgatcgagggggcaaaaacgacgctggtgctgaccgtactttcaatgatcatcggcacgctgatcgcccttgcgctgaccctgttacgtcaacaggaaaaaggccttggatacgctgtcgcaacgtcctggatcgaagtcgctcgcaatacaccagcgctgttccaggtgtacatgatctattttggccttggcgcactggggctgcatttctccagctacctggcgatgctgttcgccctgtctttcaacaacgccggctacctcgccgagatttttcgtggcgggttgcaggctattccacgacaacaacaccgcgcagccaggtcgttgggtatttcatcattcgctgcctacacccatgtggtctttccgcagctgttcaggattgtctatttcccttacgtcaaccaactcaactgggccctgctcaacagctcgctgggcatgatcatcggcctgcgcgaactcacgggcgccacgcaggcggcccagtccgaatccttcaggacgtttgagtttttcatcatcgccgccgtgatctacttcgtcatgtccaagcttatcgagggcggcgcccgactcactttctggcgcgtgttcaaggggtaggcaatcatgcaattccaattggcttactcaggtttgcactggggcgatcttccgtttgtgctcaccggtatgtggcacaccttgttactgacgctgctggccaccttttttggcagcctgctcggcgtgatgatcggttggcttcgacaagaatcagtgttcgcacgtctcgcactcggaccgttcgtcaacgtcatccgcagcattccgctgatcatccagttcatcctggtcaacagcctgtttgccatggccggcttcgggatgagcccactgtttatcggggttgtcgtcctcagcctgtacatgggcatgctgacctcggaactggtccgcgcgggtttgcaatccgtgcgcccgcaactgaaaaaagccagccggtcactcgggctgagctattggcaggagctgcgccacctatccgccccgcttgcctttcgcacactgcttcccggctggattggcacagtgataggcctgacaaaagatacagccctcgtgagcgtagtgggctacatcgagctgctgagagcttcacagatcctgatcaaccgctcgaacgaagcactcctggtgctcgcgggcgcaggtctcttctactttgcgatctgctacccgatctcccgctacagccgccatctcgaaaaggtaatgcaccatgattgatatcaaggatgtccgcaaaagcttcggcgctgtcgaagtcatcaagggcgtcaacctgaccatccagaagagtgaagtgttgtgcctgatcggcgccagcgggtcggggaagtccaccttgctccagtgcatcaatggcctggagccgattcaaggaggtagcatcatggtcgacggcacggatgtgcacgccaggggaaccgacctgaacaagttgcgccagaagctcggcatcgtgttccagcaatacaacgcattcccccacctcaccgccctggagaacgtggcgctggcgccgcgcctggtcaagaagcttcccaacgcccaggctctgcaactggctcgtgaccacctggctttcgtcggcctcgacaatcgcgcagacatgcgccctgccagcctgtctggaggccagcagcaacgactggcgatagcgcgcgccctggccatgcagcctgactacatgctattcgacgaggtcacctccgccctcgaccctgaactcgtgggagaggtgctggatactatccgcaaactcaaggactcaggcatgaccctcatcatggtgacccatgacattgccttcgctcgcgagtgcgcagaccgaattgcattcttcgataacgggttgatctgtgaagtcggtgacgctcgccaggtaatcaatgagccacaggaagaaaggacacggcagttcctccaacgcgtattgcactgacgtgacatgagccacacaccttggcgcgttaacagtctttgacagtttctcgacaaagctgtcaaagacccccgggcgccacgcccctagcatttgagcatccaaaccacctgccgggtgctcatcatgcttcgcacgttgcgcggtattccattgctcggttgcctgttgggcagcatcggctgccaggggcaagcctctaccccgccgccgatccccaagggcgactacagcgcgatcatccgctacctgcaaacccgcatcccccgggatatggcccaggccaatgtgcccggtttgtcgattgcactggtcaacgggcaggagttgatctgggcgcgcgggttcggcatggccgacaaaaccctgggcgtgcccgtgacgccgaacacggcgtttcgcgctggtgcgatttccaagctgctcaccgccagcgccgccctgcaactggttgaacagcagcggctggcgctggacgcaccgatccaacagacgttgcgcgagttctatgtgcgttcgcgtttccacaccgaccagcaggccgccgaccgcgacatcaccttgcgtcgcctgctcagtcatcaatccggcctgcccagcgagcacctgcgcgacctgcgcaacagctatgccatggggcagatgccgatgcgcctgtccggcgtctggctgagcacaccgcccggcacccaagtggcctattccaacctgggttatgcgctggtcggcgcggcgatcgaacgcagcagcggcagagagttcgaggctcaattgcaacacagcctgctcaagccgctggagatgaaccaggcgagttttatcggcaccgcagtacaggcgggttatcgcgcccagggctatcagggtggtatcgccagcactgacgcgcaagtgcgtgacctggcggccggcggtttgtgggccagccccaaggacctcagccattacgtacagatgttgttcgccgagggcctgtacaagggcaaccgggtgatgaaccagcggtccatcgatgacatgttcacccagcaaaacaccggcaacgccctggacttcgattgccggatcggcctggcctggtttctcgcgccgtgcggtgacgagccggtcgggcctggcgtgcgcacctaccagcacagcggtggcggcgatgattttgccgcgcagttgaccctgctgccggaccagcaactggcggtgatcatcatggccaatgacagcaacgccgaagacctggtcgccaacctggccaccgacaccctgcgcctgatgctccaggcgcagaccggcgagccggtgtgcagcgacgagtgccaggcgccccgtcacgggctcaagctgcgccaggtgccggccgccatcgaccgccagcgcctgtccggcttttacgccaccgcctggggcgtgttccgcatccgggacgacgccggtcggctacgcggcgaactggccggctacgacttcgagctgctgcgtgacgaccacggctggctgcgcgcgcaaaagaaagtcctcgggttctggctcaaggacctcggcgaactcggccgcgtacagctcgacgtgatcactgtgcagggccgacagatgctcaccgcgcgcagccacggccagcgcatcgccatcggcgaacgcatcgacccgccgcccttgcccatggcgtgggccgacaccgtcggcacctatcaagtgctcaacacccatgaacccgacgcgccgttgagcggcatcagcgtgcgcctggaagacggcttcctggtgattcgcggccaactgcacgacgagcctttgaccgattacatcctgctgccggtggacaacgcccacgccgtactcgccggcaacggttatggcctgggcgacaccgtcagccgccaggtcaacggccttagcgcctcgggatactccttcaaacgtacccatccacccttgagtttctgaccgacatgaaaaccctgatgagccccaaaaacctctgcctgtccctcacctcgctgtgtttgctggcaagcgccgacgcagtgctggccgaggactggacctacacgctcaaagccggcgtggccaacctgccccgctacagcggcagcgatgagcgcatgactgcgccggtgttcggcggcgccatcgtcagcccctgggggattttcctcgacaccgacaaaggcctgggctggggctacgaaggcaatgccttgagtttcagtgcgtatgtcggcgccagtgcatcgcgcaaggacaaaaacgaatccatgcacttgggctccaagcgccttaagggcatgggcgaaatcaagtcacgcccgcagctgggcgtgagcgcccactacaatctcggcggcgccattgtcggcgcgaccctggagcacgcgctcaaggaagatgaccacaaggacagcggcaaggcctttacgcatttggagctgagcctgggcaccacgctgtacgaaggccgttatggctccgtcgatgccaacatcaacagccactttggcgaccgtgactatatgcagacctggtacggcgtcaccaccggccaggccgcacgcagccgcttcaaggcctacaaggccggtgccggcaatatcagcaatggcctgaacctggtctggagcctgccgatcagcgagcacaccgagttctcgaccttgctggatgtgcagtacctggcggatgaagcgggcaagagcccgattgtggagcgacgcttgcagacgtcggtgatgggcgtgctggaatacacgttctgattggataggtgggagggggcaagccccctcccacacttgatctccattgaatgtaaaagcgctattcggcgtaggcccaggtcatccggaacgacgcgccgccccattccgaatcctgcacctgcacctggccaccgtgccactgcgacacccgctgcaccagcgccaggcccaggccgaagccaccggtgcggcggtcacggctggcatccaggcgcatgaagggttggaagatcttcgaacggccttcctccggcacgccagggccgtcatcacacacccgcacttcatacccgctgccgaacttgaccaacgacacttccacacggcgctcggcataccgaatggcattgcgcagcaggttgatcaccgcacgcgccataaagcgcggctcgatctggatatagtccacttcgcaggtgcgcaacgacaactggatgcccgcggcttcggcctccagcgccacgctgccgatcacactgtcgagccagctgtgggcctcgatgcgctcgcgggtgacctgggtggcgccgcgctccaggctggcgtaggtgagcagttcggagaccatttcttccagctcgcccaggtcggcatacatgtcggcgatcagttcgccacgcagacgcgggtcggcttgttgcttgagctggtcgagctcgaacgacaggcgtgcaatcggcgtgcgcagctcgtgcgacaccgcattggtcagttcgcgctggttggcgatcaggctttcgatgcgctcggccatctggttgaagtgccccgccagttcgcgcacggtggaacggcgcggcagcaggatgcgagaactgaggtcgttgtcaccaaagcgttgtgcggccaggcgaatatgctcgaggtcgcgccagtgcgggcgtacccagaaatacagcacgatcgccaggcacaccccgaggaaaccataggcccacaggtagagccacttgggttcttccggcagcttgatttccagcagttgcgggccgccgtcaatactggtgagaaactccatgaaatcaccgcgcaccaccagcaaacccgcagccagcagttgcgtctcgcgctcggtgagtgcctgggtgtccttctggaccaacttcaagtgcagcccgtaatggggttgcagctcagccagccgggccgggcgttcgtcggccctgagcggacgcagttgctccaccagggcatacgccgggccgcgcaaggcttcgcggttataggtttcgttggcttcgggcaacagctcgtcgaaggtgtagttgaccagccagatcgcccccgccagaccgagcgccaggatcacatacaggcgcagaaacagccgcagcatttaagcctcccacgcgaacggattgaacaggtagcccttgccccagatggtcttgatacacaccggttcacgggggttgtcgttgagcttgctgcgcagtttgctgatgtacacgtcgacgctgcggttgaggccgtcgaacgcgataccgcgcatgcggttgaggatgtcatcgcgggacaggatcgtgcccgagttgctggccagcagccacagcagctcgaactccatggtggtcagatcgatcttgtcgtcgcccaggctgacgccccggcaactgcgatcaatggccaaccgcccgaatgccagggcaccgcgcacggtcggctccggggcctggcgtcgttgcagcgcacgcaggcgcgccagcagcacaggcggcttgatcggcttgatcacatagtcgtcggcgccggactccaggcccaggatgtggtcaaggtcatcttccttggccgtgaggatcacaatcggcgtgtcggacacggcgcggatcccgcggcacacatgcaggccactctggccaggcagcatcaggtcgagcacgacgatcttcggcttgaactccaggaacgcagccagggcctcgtcgccccggtgctccacacgcacctcgaagccatgctgcgccaggaagtgcgcaatcagccccgcgagtttttcgtcgtcttcaacgagcaagaccttgcccagccccaggttttccataagttctcagtgtgcagacgcggattgaagagctggcattataggtggcaagctgcgcaactaaagcaactgcgcagcggctgccgacgaagcttcatgcttttaagagtttttaacaaataccccgcactctttaacgccgtccacagggagttgtatgcgcaaggattacctggcgttctttgtttcgctgttcctgtcgcggctggcggaccagatcctgctgttcatcgtgcccctgatcgtattccagaccacccagagtgtagcctgggccgggctggcattcttcgtcgagtcgctgccgcgttacctggcgttcccggtgtgcggcgccttgtgcgacaagttcacgccggtgcgcctgctgcagatcagccaggtataccgggcgctggcgtgcgtgctcgcggtggtgttgtatggggtgttcgatggcctttactggattgtcctgctctcggcgctgtgcggggtgctcacgacccagggcatcatggcgcgggaagtgctgatgccgcatatcttcgcgcactacagctacgccaagaccctctcctactcgcagatcgccgaccagagcgggctggtgctggggccgctggtggcggcgctgatgctggaagtctgggcctggcattgggtggtactggccgtggccggattgtttgtgctggccgacctggcgatgcgcgtgtggcaacgctccagcacggcgcacctggaaaccttcgaacagcatcaggacatctggctgcgaccgctaaagattgcgttcgggcatatccgcaacctgccggacttgaaacggatcatcaccctggccgtgggggtgaacctgatcattggcgtcaccctggccacgtcggcggcgatggtcaccggccagtttgcggcgggcaaggacgcctatgccttgctgcaggcagcgggcgcattagtgaccatcggaattttgttttacctggcccgggccggactgccgttgaaggtactgggcggcttgtcctattcgatgatcggcgtgggggcgttgatcatggccgcaagcccaggcgtgtggctgtacgccgtgggtttcctgctggtgaccggcttcgacaagatgttcaacgtctacctgcgcagcacccgccagcgggtgatccccgtgcaggacttcggcaagaccgtgggcgtgatcaccctactcaacaacctgccgcaacccttggccggcctggcagtggcggtgctggcggcgccgctggggacgcagacggtgatcctgctgctgaccgggatcgccgcgttgctcggtgtggccgtggcctcaggctggcacgccactgtgaaagcggaactcgatgtcgggtgactcgatcagttcctgctcggtcgccctcacccgctcgatcacctgggcgacgtccttggcgtcgccgtattggtacgccagcttcaggtaaccctggaagtgccgcgcctcgcttttcagcaggccgaagtaaaacttgccgagttcctcgtccaaatgcggcaccagggcttcgaaacgctcgcaactgcgcgcttcgataaaggcgccaaccaccaaggtatccaccagtttcacgggttcatggctgcgcaccactttgcgcaaaccggaggcgtaacgcccggcatgcagttggcgcagctcgatcttgcgcttcttcatcaggcgcatgacctgctcgtggtgcaccagctcctcgcgggccaggcgcgacatcatgttgatcaggtcgacatggccgtagtacttggcaatcaggctcagggcggtgctggcggctttgaattcgcagttcttgtggtcgatcagcagggtttcctgatcggccagcgcggcctggacccaggcatcaggggtgcggcaaccgaggaattcgtggatttctggcaggttcatcgggctcacgggcaaaaggatcacaaaaggccggcgattataccgaccccgccgcagaccaccagccaccggccttgatgtgcatcaacatgacgtgcgcacgccagcaactatagttgttccaggcccccgtcctttttatggagatcccgatcatgcaagccatccgcagcatcctggtgatcatcgaacccgagcattcggaaagcctggccctcaagcgtgccaagctgattgccggggtcaccgatgcgcacctgcacttgctggtgtgcgacaagaagcatgagcactcggcgctgctggccctgctcaaggcgggtttgaaggaggacggctacagcgtcagcaccgaacaggcgtggaatgccagcctgcatgaaaccatcatcgacgtgcagcaggccgagggctgcggattggtgatcaagcagcacttcccggacaacccgctgaaaaaagccctgctgacgccggcggactggaagctgctgcgctattgcccgagtgcggtattgctggtcaagacgtccacaccctggacgggcgcaaagatcctggcggcgatcgacgtcggcaataccgatggcgaacaccgttcgctgcacaattcgatcattgaccatggctttgatatcgccaacctggccaaggcgcagttgcatgtgatcagcgcgcatccttcgccgatgctgtcggcggcggacccgacgttccagctcaaggaaaccatcgaggcgcggtatcgcgagcaatgcagggcgttccaggcggagttcgatgtggatgacaaacacctgcatattgaagaaggccctgccgatgtactgatcccctaccttgcccacaaactgtcggcggcggtcacgatcatcggcaccgtagggcgcaccgggatttccggggcgctgatcggtaacaccgcagaggtggtgctggacgccctggaaagtgacgtactggtgctgaaacctgacgaagtgatggatcgcctcgtggagcaggccaacaaggcctgatgccgacctttcaaacaatgaagataaaaaatgtgggagggggcttgcccccgatgagggtgtgtcagtggataaatcccaggctgacacactgccatcgggggcaagccccctcccacaggggttatccgttgtcagttggaaaacacatcgcgcagaaaccccggcgcgatatagcgctggtaatgcgcctcggacaggataaagaactcccgatcaatcgcatcgcgcaggtccggcaacggccagtcgcgaaactccggcaatagcaccatgccataggcctccaggttggagatcacccgcgccccccgggcgatcaactggtaggcccagcagtactcggactggtgcggcacgaagcggatcttgcgctgttccaactggccgcgcagggtcttggggtcgaaaacctccagtttgccggccattacctgcaccaacagctgctccaggcgtagccagaccgcacgtttttcttcttcgttatagcaattccactggatcacttcgtggtggaagcgcttgcagccccggcacaccagatcgccgtaaaccgtggagcacaggccgacgcagggggtcttgatggtttggttggacatgggtaacggcacgcagatcagcaaaacaatgcgccatgttagccctttgtctaagctcgatcacccagcaaacttggtcaggcaacttacctttagaaattttttgccgtagaatcatccggccttgtaaggcgccaataatccgctggaagctgttttcaaagcgtcacgagcacagtcgttccttcagaacggtgttggcgcgggtcatgactcggtaggtcagagccctcgccaaccctcatcagctccgttctgcaggcgtaaaactttgaaagcagcttctgtgaggaatgccggcagcgctggctttgcggcccaaaaagcccccgagcgcatgcgtgccgttcatttctggatgagcgtcccgtgggaccactgatgagggtaataactgtgcttgaagcctaccgcaaacatatcgaagagcgtgcagccctgggtattgttccccagccgcttaacgccgaacaaaccgcaggcctggtcgagctgctgaaaaatcccccggctggcgaagaagaattcctcgttgacctgatcaccaaccgcatcccaccaggcgttgacgaagctgcctacgtcaaggccggtttcctgtctgccctggccaagggcgaagccacttcccccctgatcgacaagaaacgcgccgttgaactgcttggcaccatgcaaggcggctacaacatcgtgaccctggtcgagctgctggacgacgccacactggctcccgtcgccgccgcccaactcaagcacaccctgctgatgttcgatgcgttccacgacgtggccgaaaaagcccgtaacggcaacgaacacgccaaagccgtgatccagtcctgggctgacggcgagtggttccgcaaccgccctaccctggccgacaagatcagcctgcgcgtgttcaaggtgaccggcgaaaccaacaccgacgacctgtcccctgcgccggatgcctggtcccgtccagacatcccgctgcacgccctggccatgctgaaaatggcccgtgaaggcatcgtgcctgacgagcaaggcaagaccggcccgatgaagcagatcgaagaaatgcgcggccaaggcttcccgatcgcctacgtcggtgacgtggtcggtaccggttcctcgcgtaaatccgcgaccaactccgtgctgtggttcttcggcgacgacgttccgtatgtgccgaacaagcgtgccggcggcttctgcttcggcagcaagatcgccccgatcttctacaacaccatggaagatgctggcgcactgccaatcgagttcgacgttaccaacatgaacatgggcgacgtgatcgacctgtacccgcatgctggcaaagtctgcaaacacggcaccgacgaagtcatcaccaccttcgaaatgaagaccccggtgctgttggacgaagtccgcgccggcggccgtatcccgctgatcatcggtcgcggcctgaccgacaaggcccgtgccgagctgggcctgggcccaaccgacctgttcaagctgcctgaagcgcctgtcgacaccggcaaaggcttcaccctggcgcagaaaatggtcggcaaggcgtgcggcctgccagaaggcaaaggcgttcgtcctggcacctactgcgagccgaagatgaccaccgtgggttcccaggacaccaccggtccgatgacccgtgacgaactgaaagacctggcgtgcctgggcttctcgaccgacctggtgatgcagtcgttctgccacaccgcggcctatccaaagccgatcgacgtgaccacccaccacaccctgcctgatttcatcatgacccgtggcggtgtatcgctgcgtccaggcgacggcatcatccacagctggctgaaccgcatgctgctgccggataccgtcggcaccggtggcgactcccacacccgtttcccgatgggcatctcgttcccagccggttccggcctggtcgcgttcgccgcagccactggcgtaatgccgctggacatgccggaatcgatcctggtgcgtttcaaaggcaagatgaaacctggtatcaccctgcgtgacctggttcatgccattccttactacgcgatccagtcgggtctgctgactgtagagaagaaaggcaagaagaacgccttctccggccgcatcctggaaatcgaaggcctgaacgacctgacgctggaacaggctttcgagctgtccgacgcctcggctgaacgttcggctgctggttgcaccatcaagctgtcgaaagagtcgatcaccgaatacctgaactccaacatcaccctgctgcgctggatgatcggtgaaggctacggcgatccacgcaccctggaacgtcgcgcccaagcgatggaagcctgggtcaagaaccctgagctgatggaagccgatgccgacgcggaatacgctgaaatcatcgagatcgacctggccgaaatcaacgagccgatcctctgcgcaccgaacgacccggacgatgcccgtctgctgtcgagcgttgccggcgagaagatcgacgaagtgttcatcggttcgtgcatgaccaacatcggtcacttccgtgccgccggcaagctgctggagcaggtcaagggtcagctgccaacccgtctgtggctgtcgccgccgaccaagatggacgctcaccaactgaccgaagaaggctactacggcatctacggcaaggctggcgcgcgcatggaaatgccgggctgctcgctgtgcatgggtaaccaggcacgtgtagagccgaactcgactgttgtgtcgacttcgacccgtaacttcccgaaccgtctgggtgacggcgccaacgtctacctggcttcggccgagctggcagcggtagcttctaccctgggtcgcctgccgaccgtcgaagagtacatgggctacgccgcgaaactggacaccatggccagtgacgtctaccgctacctgaacttcgaccagattgctgagttccgcaagatcgcagcaagcgccaacatcccggtgattcaagcctaaggtgttgatgtgaagagacgccgcgtatcgtgaggtacgcggcgttttttatgcctggaatgcagtacaaatgtgggagggggcttgcccccgatagcagtgggtcagccaataaatccggcactgagacaccgcgatcgggggcaagccccctcccacatttttaccccgtcaggtttaagcgaagaacgaataaaccaccgcagtaatcgccaccaaccccaccgcggtgacgaacacattggacgcctgcccccggtacttggccatggccggcaccttgcgaatggcatacatcggcatcaggaacagaatcgaagcaatgatcggaccgcccagcgcctcgatcatgccgagaatgctcgggttcaacgtcgccacgatccagcacaccaccagcatgaacgccgccgtcatgcggtccaggcgcttggcctccggacgacgccccgtcttcagcaccaggcccttgaggccttcgctggcgccgatgtaatggcccaggaacgacttggcaatcgccacgaacgcaatcaacggcgctgcgaactcgatggtcgggttattgaagtggttggccaggtacgacaggatcgacaggttctgcgccttcgcttcggccagttgcgccggcgacagggtcagcacgcaactgaacacgaagaacagcaccatcaccaccatcaacagatgcgcacgcgacaggatctgcgagctgcgctcatcggcgtgggcgccgtactggcgcttctggtccactgcaaaggccgagatgatcggcgaatggttgaacgagaacaccatcaccggaatcgccagccacagggtgttgagcagtgcggacggtgccgggacttggctggcggtgctgaggatgccgccgttccaatgcgggatcaggtacaccgccaggaacagcaacgcgacgataaacggatacaccatcaggctcatggccttgacgatcacttgctcgccgcaacgcaccacgcccagcaggccgaggatcagcacgaacgacaggatcgcccgtggcggtggcgcgatgtgcagttggtgttccatgaagctgccgaccgtgttggtcaacgccacactgtagatcagcagaatcgggaagatcgcaaagaagtacagcaaggtaatcagcgcgccggccttgatgccgaagtgttcttccactacgtcggtgatgtcggagcctgcacggccagacagtacgaaacgggtcaggccacggtgggcgaagaaggtcatcgggaacgccagcagcgcgaggatcaccaggggccagaagccgcccaggcccgcgttgatcggcaagaacagcgtaccggcgccaatggcggtgccgaacaggccaagcatccaggtggtgtcctggcggctccagcttgtgagggttgcaggtgtcgttgcatagcgttcgtcgacgctattggcctgatcattcatccggtcggatctccgcatttacacagccgggacgagtcagaaaaacctgacaggcagcgccccgaccatagaaggggccggattgtccgggattcttgtgaataagcaaagacttagctgaggaacggtggtgcggtacaggcccgcaggggcggctgtaggcggcgattttcgcggcgcttggcgagatacctgatatacattcccgcacaaatctattttagaatttcacacgttactgtagttttcacacaacgcccaccgtgtatccagagagccccgccatgcctcgcgtctcccgcaaacaagccgatctcaaccgcgaaatcatcgtcgaggccgccacgcacctgtttcgcgaacgcgggctgcatggcatcagtctgtcagacgtgatggccgctgccggcctgacccacggcgggttctacgggcacttcgcctccaaggaggccctggccaccgaagcctgccaacaggcattcgagcacgccaacctgggctggcaggccaaaatcgagcacagcgacgatcaacaggccgcccgccaggcggtgctggggccttacctgaccgccacccatcgcgacaaccctggcgacggttgcccggtctcggccttcgccccggatatgtgccacgaacccgctgataccgccttgcagcacacctttatagaaggcgtggaaaagtccctggagattttctctcaactggacgacggagaccgtcaagccatgctggcccattacgcgatgatggtgggcgcagtcaccttggcgcgtgcgacacggggcaatagcctgtcggacgagttcctgaaggctgcaagaaataccctgttgcccgttgacagcccttcccccatcccagcatgatcgggccatgaacattatccagctcgtcctcacccgtaccaccatcacgaccgcttacggcgggtcgcgcggtggctgtgggtgcttgagctagacacttcacagatccaacccaaggccccgccagcaatggacggggcctttttttgctccgtccgttcggcaaccaccaggagcaacaccatggctgacgccctgctgatcatcgatatgcaaaccggtttatacgatggcccggacaaaccgtttgaacgcgaacgcgtgctcgcctccatcaaccagctgattcatcgtgcgcgcaacgcaagcgtaccgatcttcgtggcgcgccacaccggccctgggggctcaccgattgcagccggcagcccgttctggcagctgtggcatgagctagaggtcgacgaatcccgcgattacctgttcaacaagacccgtcccagttgcttcctgggcaccgatcttgagcagcaactgagcgcggcgcaggtcaaggagttggtgatcgtcgggatgaaaacccagttctgcatcgacactacctgccgggtcgccgtggagttggggttttcggtggtgctgcccgaagatggtcatacctgcatggacacgccggcgctaaaagccgaggcgatcatcgagcatcacaatacgaccctggccggtgcgtttgtaaagcgggccagcgtggccgagatccgcttctgaccgcacaaatacggcatactcctcccctcaaacccttcaggaagagccttccgatgaccgctactgttctggtcctggttgaaaccatcaacgaatacctgcccatcatcgagggcaatgactttcatgtgatcctggcgccgacccctgccgaacgcgccgaagcgatcaaggcccacggcagccagatcaaggcggtgctgacccgtggcccgctgggcttgtacgccgaggaaatcgccgccctgcccctgctggaaatcatctgcgtgatcggcgccggctacgaacacgtcgacctgcaggccgccagcaatcgcgggatcgtggttaccaacggcgccggggtgaatgcgccgtcggtggccgatcacgccatggcgttgctgctgtcgctggtgcgcggcatcccgcagaccgacgccgcggtgcgccgcagcgaatggcccaaagtgatgcgcccgtccctgggcggcaagcaactgggcattctcgggttgggcgccgtgggcatggagatcgccaagcgcgctgccctggggttcggcatggaagtgagctatcacaaccgccaaccgcgtgacgatgtggactacacctactgcgccaccgccgttgaactggcgcgcacctcggacttcctgatcctggccacgccgggcggcgccagcactcgccacctgatcgaccgccacgccctggatgccctggggccgaatggctacctggtcaatatcggccgtggcagtgtggtggtcaccgccgacctggtcgccgccctggagcagcgtcgcatcggtggcgccgcgctggacgtattcgacgacgaacccaaggtgcccgacgcgctcaagaagctcagcaataccgtgctcacctcccacgtggccggactgtcgccggaagccgcccacgacaccgtgcaacgcgtggccgacaacctggtggagtactttgccggccgcccggtgctcaccccggtcgccctgccccccgcccactaaatgaccgatcaggcacgctgatcatcgtccaacacgctaacctattaagccgccccgaccttgtcgctgggcggctgcgcgcattagattaggaaatagtccaaggcctttagaataagcagaagggataagcatggcgctgaacgaccaatcgacccagattcgcccaggcgaagagcttgatgccagcctgatcgatccctacctcaaggcccatatcccgggcctggacggcacgcccaggatcagccagtttcccggtggtgcgtccaacctgacctacctgctggaataccccggccaggaattcgtgctgcgtcgcccgccctttggtcacaaggccaagtccgcccatgacatgggccgcgaataccgcattctcaaccagctcaaggacggcttcccgtactgccccaaagcctatgtgcattgcacggatgagtcggtgatcggtgccgagttctatgtgatggagcgcgtcaacggcatcatcctgcgctccgacctgccagccgaactgggcctggacgccagcaggaccgaggcgttgtgcaaaagcttcatcgataagttcgtcgaactgcaccaggtggactaccacgcctgcggcctggccgacctgggtaagcccgagggctacgtggcacgccagatccgcggctggagcgaccgctacgagaaagccctgacccccgacgcaccgcgctgggaagcggtacgcgcctggctcaacgacaagatgccggccgatcaccccacgtccagcatcgtgcacaacgactaccgcttcgataacgtgatcctcgatccgcacaacccgatgcagatcatcggcgtgctggactgggaactcaccaccctcggcgacccgctgatggatctgggcaacaccctcgcctactggatcgaagcggcggacccggcaccggtgcaactgatgcggcgccagccgagcaacgcccccggcatgctcacccgccgcgagttcgtcgactattacgccgagcgcgcaggcctgcagatcgacaacttcgacttctactacacctacggccttttccgcctggccggcatcgtgcaacagatctactaccgcttcttccatggccagacccaggacaaacgctttgcgcagttcattcacatgaacaagctgctcgagcagatgagcctgaacgtcatcagcaaatcgtccctttaaggaaccgctatgtccaagacccacctgttcgacctcgatggcaagatcgcattcgtttccggcgccagccgtggcatcggcgaggccatcgccaagttgctggcccagcaaggcgcccacgtgatcgtctccagccgcaagctggaaggctgccagcacgtcgccgacgcaatcatcgccgacggcggcaaggccacggccgtggcctgccatatcggagaaatggagcagatcacccaggtattcgccggcatccgcgagcagttcggccgcctggatatcctggtcaacaacgccgcgaccaacccgcaattctgcaacgtgctggacaccgacctcggtgcgttccagaagaccgtggacgtgaacatccgtggctacttcttcatgtccgtggaagccggcaagttgatgcgcgagaacggtggcggcagcatcatcaacgtcgcctcgatcaacgggatctcgccgggtgtgttccagggcatctactcggtgaccaaggccgccgtgatcaacatgaccaaggtgttcgccaaggaatgcgcggcgttcggcattcgctgcaacgccctgctgccgggcctgaccgacaccaagttcgcctcggccctggtcaagaacgactcgatcctgaaaatggccctggcgcagatcccgctcaagcgcgtggccgagccgagcgagatggccggtgcggtgctgttcctggccagtgacgcgtccagctacaccaccggtgtatcgctgaatgtggacggtggtttcctgtcctgatcaggcattcggcggctgttgccgaaagctcaccgccaggcggttccagccactgatgctggacaccgccatggtcaggtccaccagttcctgctcgctgaactccacacgcaccgccgcatacagctcatccggcaccgtcgaggtgggcagcgtcgccaccgactcgctccaggccaatgcagccttttcccgcgccgtgaagaacggcgaatcccgccatacgctcaaggcaaacaaacgtcgctcggtttcgccgcgttgacgcgccgccatcgagtgcatgtccgtgcagaaaccacagtagttgagctgcgatacacgaatcttgatcagctccagcaaaggtttttcgatggacaggtcgaaggtcgtcgcctccagcatcagcatgcccttgagcgcttgcggcgaggcggtgtagtaatccaggcgaggttccatgggcgtttctctgaggttgcggcaaggacagtccagcctagagcccgcatggaataagccctatagccaatcggccggtttacgcacagaccattttgcgccagccctgcacgcgcgtactcttggcgcagattgaatgccctgggacaagtcatggaactgcacgttgtaatcaatggccgcaaggacctggccgaacagctctatcaacagctgcgcgaagccatcgggtccgggcgcctggccgccggcgcgcaactgccgccaagccgtttgcttgccgaacaattgggcgtgtcgcgcaagaccgtgtctgacacctacgccacgctgacctacgaaggcctgctggtgggcaagaccggtcgcggcaccttcgtcaacgcaagctcgccgcagtccgagcgcgtgcaaaccgccgccgacctggcctgtgccgccaacctggcgaaatggcaggcgctgccctcgccgatgcgtcatcccacacgcgatagcaccttgcgctatgaatttatcggcggcgccaccagccgcaaccagttcccccaggacgaatggcgccgctgcacccaggacgcgctgcggcgcattgcccagaacagtggtttctacagccaacccgagggcttgccggcgctgcgcagcgcgatcgccgggcacatcgcgttctcccgtggggtcaactgccgcgacagcgacatcgtggtcaccaacggcgcgcaacaggcgctggacctgattgcccgcgtggtgctggaaccaggcagcattgtggccatggaagaccccggctacagccctgcccgccagatgttcatcgcggtaggagcccaggtcgccagcgtgccggtggacgaacagggcatccgggtcgaccggatccccgatggcacacggctgatctacgtgacgccctcccaccagttccccctcggcatgccgatgagcctggcacgtcgcgaagccttgctggcgcgtgcgtttgcgctgggcgcaatcatcatcgaggacgattacgacagcgagttccgttacgaaggacggcccaccgactcgctgcaaagcatggacacccgtggcgtggtgacctatgtgggcaccttctcgaaaaccctgctacccgagctgcgcctgggctacgcagtgctgccgccggccatctacggtgcggtgctcaaggccaagcaattgaccgaccagcacagctccaccctgccccagtgggcgctggccaagttcatcagtgagggctacctgctcaagcacatccgtcgctgccatacggtctacgccgggcgtcgcgaacgcatcctgcaacgcctggcgggggacctgtcgccgtggttcgaagcggtgccgaccgtggccgggttccacatggcggcgctgtgcaaggtgccggtgaatatcccgctgctgatggagctcgcacgccgggtggaagtgggcttgtaccccctggatgtgttcttccacgacgcgccggtacgctcgggcctgatcatcggcttcggcgcgatcgagaccctggacatcgacccggcgctggacaaggtgcgcgatattctccagcagattggctagcgaattttccgccggattggtcattggtcctgtcaccatcaggctctagcctgtgcactgccacccgacctcggagaccatcgccatgcaagcctttgcctataacactgtccatatccgcgcggcggtcgggcgctcatcggaactgggcgaacgcctgcaagggattgtcgacgccgtacgcaccgcgcccggttgcctggattacaccattcagcgcgacccggtggaccccgacctgtggaccgtcaacggccgttgggcctgcgtccgacaactcaacgcccacttcgcgctccctgcgctgcaggggttcatcgaactgacccgcgaacacctggccctccgcctggaattcgaccactgaggcattggcctcctggtcttcgcagggattggtcattggtcacccaggccttgcggcgtagggtgaacaggtctcgaactactcggaaacttcatcatgaaacgattgctcgccgcctccctaatgctcgcctcgctcagcgcctttgctcatgaaccggtgtacaaccaggagtcgatcaaggtcttgcaggagcacgcgctgaccaatgtcccgggcaagaaaaccctcatgctcaccgtcgactatgcccccggccaggccaccgtgccccacagccacacgggcaccgccgtggcctacgtgctggaaggcgcgatcacttcacgggtgaatgacgagcccgcaaaaacctacaaggtcggcgagtcgttctacgagccggccggttcccggcacttcgaatcgagcaatgccagccagacccaaccggccaagctgctggtggtgatggtgctggatgacaaggccgaggtgcttacccccctgcccaagtaacccgccacgccacaaaccagaaaggtgggagggggcaagccccctcccacattttgatttgcatcggtcagtgactcaggggcgctggaactggcggcgcaggccttcgatccgctcgcggcaggcgcaaccttccaagtgatcattgaccatgcccatcgcctgcatcaacgcatacatcgtggtcggccccacgaacgtccagccgcgcttcttcaaggccttggacaagcgcactgaggccggcgacgtgggattgcccgtccagtaagccatgtccaccaccgccggccgttcctcctcaccgggttcgaacgcccacaaccagcgcgccagcgacccggtctcatccaccagctcacaggcgcggcgcgcattgttgatcgtggacacgatcttggcccgattgcgcacaatgcccgggtcctgcatcaagcgcgcgatatccgcctcgccgtactgcgccacccttatgaaatcaaagccctcgaatgccgcccgaaactgttcacgcttgcgcaaaatggtgatccacgccatgcccgcctgaaagccttccaggcagatcttctcgtacaactggatatcatccgccaccggcacgccccattcggcgtcgtggtaacgcgggtattccggcgccgccgtgcgccagctgcagtgggtgtgcccattgtcgtcagtggtcagtcctggtgtgtccatccatcacctcatgtgccgagcagcggatgataagcgaaaaaaattccaccccgccaaccgctcaagcatcgcccttaccgaccaactggtcagaccgggacctgtcaaccgccaaataattgcttgtgatttcaaaaataccgggcgtagactggccccgcactggacttaccggtaagaccacaacaattaagccctggaaccaccagggcaccgaatagagatccctcccatgctcagatggtgctcgcgttcgattttcctgcaagtcgtgattggcctgatgctcggcatcgcctgcggcctggcccttcccgaattctcctcgcaactcaaacccctgggtgacggctttatcaagctgatcaaaatgctgatcggcctgatcgtgttctgcgtggtggtcagcggcatttccggcgccggcgacttgaagaaagtcggacgcatcggcctcaagtcagtgatctacttcgagatcctcaccaccgttgcgctggtgatcggcctggtcatggccttcagcaccggcatcggccaaggcgccaatatccacctggaacaattgtcctccgctggtttgaatgaactggccgacaagggccagcacatccgcggcaccagtcagttcctgatggacctgattcccaactcggtcatcggtgcctttgccgacaacaacgtgctgcaagtgctgctgttttcggtgctgttcggcagcgcgctgaacctggtgggcgaagcggcgtcgggcatctcgcgactgatcaacgaactgagccatatcattttccgcatcatgggcatgatcgtgcgcctggcgccgatcggtgtgttcggtgcaatcgccttcaccaccagtacctacgggctggactcgctgcagcacctggggagcctggtgggcctgttctacctgacctgctttgccttcgtcgcgctgatcctcggcctggtgatgcgcctgtcgggcctgcgcatgttgccgctgctcaagtacctgcgtgaagaactgctgatcgtgatgggcaccgcttcctccgacgccgtgctaccacagatcatgcgcaaactggagcacctgggcattggcagctccaccgtcggcctggtgattccaacggggtattcgttcaacctcgatggcttctcgatctacctgaccctggccattgtgttcatcgccaatgccaccggtacccccctgtcgatgaccgacctgttgacgatcctgctggtatcgctgatcacctccaaaggcgcccacgggattccggggtcggcgctggtgatcctggcggcgaccctcacggcgatcccggcgattccggtggtgggcctggtgctggtgctggcggtggattggttcatgggcatcggccgtgcattgaccaacctgatcggcaactgcgtggcgaccgtggccattgcccgctgggagaaagacatcgacatccagcgcgccaacaaggtgctcgacggtcagcaaggctatgccttccaggccaagaagccggtgttgcccgcacaccaggagttctgaaatgtgggagggggcaagccccctcccacacatccattcgcaacatcaaggagacgcacgacgtgatcagcacctcaaccgtcgtcaattcagtcgtagaaaaactccgcgccgccttggcgcgtggtcagtggcgccggggtgaaatgctccccggccagcgcgaactggccgaacagatgggcatcagccgccccagcctgcgtgaagcggtcatcgtgctggagaccctcggcctggtgcgatccatgcccggcaaaggcgtggtggtgctggaaaccagcgtcagcgaaccgcagtccagcgatgccgtggccgacgccagcctggaagacatcctgcaactgcgctacaccctggagccgttcattgtcggcctggtggcccagtccatcagcagcaaagaggtcggccaactgcgcctgaccttgatggacatgcgcgaagccctcgatgccggtgacgctgaagcgggcatgaacgcctacatcggctttcacgaggaactgttcgccctcacctccaacccgatcttccagaacgtggtgcagcagaccagcaacgccctcaagcaaagcgcccaggtgctgcgcaactcgcccgaacacctggccgaacgcctgcaggaaaacgaagccgtggtgcgcgccatccgcaacaagaacagcgccctggcgagtgccgagatgcgccggcacatcctgcaggaaggcctgcgcatgggcattgccctgaacatcccggacgaccatctcggcagctgattttttggagacaggccatgaccgcccacgccttgcactacgaccccatcctgccgaccctgcgcctggtcgccggtaaaaagccttcggtggatgacatctacccgcgcttgttcgacgccatcctcgaacaacgtatcgccccggccagccgttttaccgaagaaggcctgggcgaaacgtttggcgtgagccgcagcgtgatacgccgggtgctggccaagctgtcccatcagcaagtgatcatcctgcgccccaaccagcgtgcccaggtggccgcgccggatgctcagcagacgcgacagatcctcgaagcgcggcgcatgaccgaaatcactgtggtgcagttggcctgcgcccaagcgacagccacgcagatacgtcagttgcgcgaactgattgcacgggaacgtgattgcatcgaacgcgatcagcgtgggccggcgattcggttgtcgggggagtttcacctgcatttggcgacgatggccggcaatgcgccgttggcgcagttcctcaacagcctggtgccgttgacgtcgttgatcattgcccagtacgaggcaaaggcctgcacgtattgcgcgtggcaggagcatgtggcgattgtggatgccgtggagcagcgcgattcaaacgctgccgtggccctgatgaaccagcacctggctcacctggaaagcaaattactgaaacaccactgatatccagataataaagatccaaatgtgggaggggcggtgcgacgattcgacttgcccccgatggcagtgtgtcaatcaatgaagatgttgactgatacaccgccatcgggggcaagccccctcccacattggtttcaccaggggtctaggccggttgcaacaccgactgcccactcaacgccaggtccagcaactcacggttggctaccgcgtacatggcgtagtccgtgccgaccgcagcacggatttccaccatcatcgccacccaacgctcggccatgtccttgtgctgctcaagccacagggccacgcgggcttccatgtcttgtggcgcatcggccatttgcaggacggaaatggtgatcgcgcgttgctgccagtccacatcgtcgcggaacgcttcgcgggcctgggcctgccagttgttgcccaccggcagatcactgatctgctgcaggtaccacggcaagtccaaggcgctgccgacggcgaagtaggccttggccacttcggcggcgtcatgcccggtcacgtcagcggcttcaatgatcggcagcaaggtgtacaggtgggtcgtgccagcaaccatgcgcgccaacagttccggtacgccggcttcggtgtaggcctggtagcgcttctgccagccttcgcgggtcgggccttccagcagttcgtcgagcttgaggcccagcgccgccaggtgcggaccgaagtgcgcggtgtcacggccagcgtcctgctcgttgcgacggctgcgcaggaaccagcgcgtggcacgacggcccaggcgcatcagctcgtccatcaactgcaattgcacgtcggcggagacctggtggtccagggcttcaatctgacggaaccagtgcgggaggtggaagatgtcacgcacgatcacataggcgccagccacgttcgccgggctcatgccggtcgactctttgagtcgctgcacgaaggtgatgcccatgtggttgaccaggtcgttggcgatctgggtgctgacgatctcgcgcttcagacggtgacgacgcatggcctcaccgaacttggcgaccaggctcggcgggaatgcggtctccatgtcacgagtcaggtaatcgtcatccggcaccagcgacttgagcagcgcttccttgaggtcgatcttgctgtacgagatcagcaccgacagttccggacgggtcaggcccttgccgttggcggcgcgctcggtgagctgctcctcggtcggcaggtactcgatagcgcggtccagcttgccacggccttccaggtcgctcatcaggcgcttgtactcggcggcacgctcgtaggcacggcgcgccgccagggacagggcctgggtctgcttgtagttgttgcccaacaccaggctgccgacttcgtcggtcatgctcgccagcaactggttgcgttgcttgtcggtcatatcaccggcctgcaccacttcgttgagcaggatcttgatgttcacttcgtggtcggagcagtccacgccaccggcgttgtcgatgaagtcggtgttggaaccgccgccattgaggccgaattccacacgacccagctgggtcatgccgaggttaccgccctcgcccaccaccttgcagcgcagctcgttgccgttgacgcgcagcgcgtcgttggccttgtcgcccacgtcggcatgactttcgctgctggccttgacgtaggtgccgataccgccgttccacaacaggtccaccggcgccttgagcaaggcgttcagcagttcagtcggggtcagcttgtcggccgcgatgtcgaagcgttctttcatctgtggcgagatggcaatgctcttcgcgctgcgcgagaagataccgccgccttcggacatgatgctggtgtcgtagtcggtccaggccgaacgtggcagctcgaacatgcgctggcgctcgacgaagctggtcgccgggttcgggtttggatcgatgaagatatgcaggtggttgaaggccgcgaccagttgcagcttgtcggacatcaacaagccgttaccgaacacgtcgccggccatgtcgccgacgcccaccacggtgatgctgtcttcctgcacattgatgccgcgctcacggaagtgacgctgcacgccgacccacgcgcccttggcggtgatgcccattttcttgtggtcataaccggcagaaccaccggaggcgaacgcgtcacccagccagaagccgtagtcgatggcgatgccgttggcgatgtcggagaaggtcgcagtgcccttgtctgctgctactaccaggtacgggtcatcgtcgtcatggcgcacgacgttggccggtggcaccagggcgccatccttgaggttgtcggtaatatccaacaggccggaaatgaagatgcggtagcaggcgatgccctcggccgcgatctcgtcacggctgccgcccaatggcaggcgacgcggcaagaagccgcccttcgcacccaccggcacgatgaccgagttcttcacttgctgggctttcaccaggccaagcacttcggtacggaagtcttcttcacgatcggaccagcgcaggccgccgcgcgcgacgttgccgaagcgcaggtgcacgccttcgacccgtggcgagtacacgaagatttcgaacttcggcacaggcttgggcagctcagggatcgcgtgcgggttgaacttgaagctgaagtacgacttgttctggccgttcgcgtcggtctggtagaagttggtacgcagggtcgccttgatcaggtccaggtagcgacgcaggatgcggtcttcgttgagcacctggacgtcgtcaagggcggtgaggatcgcttgttccagacgttgctgcttgtcttccaggtcgtcgctggtgagcttgcgcgccaggtagaaacgggtcttgaacaaccgggtcaactcgcgggcgatgtcggtgtggttgttcagggtgctggcgatgtaacccaggtcgaagcccaggcggatctgcttgaggtagcgggcgtaggcacgcagcagcgcgacgtcgcgccacggcaggccggcggtgagtaccaggcggttgaacgcatcgttctcggcgtcgccatgcacgatgtgcacgaatgcgtcctgcagagtgtcgttgagctgctggatatccaggttcacgccctcggcggcgatgaacgcgaaatcatggatccagaactcgcggccattggcgtgacgcaggcgatacgggaactcaccgagcacgcgcaggccgaggttttccaggatcggcagcacgtcggacagcgccagcggggtgtcggcgtggtacagcttgcaatgcagctcgcgctggccggaaacctggcccagcggctgatagaaactcatcaccagcgggttggcctcggtgaggctgagcaagtgctgcatgtcgaccaccgccgaatgcgcggcaaagcgctcgcggtaaccggccgggaagcctttcgggaagtccgccagcacgttggtgccatgggcttcgccgaagctttcgacgacgaggctggagtagtcgtcctgccagctgcggcaggcctgcaccacttctttttccagttgcagcgggtcgatgtccaggcggttcttcgggtctacccgcagaatcagctgcacgcgggccagcacggactcggagaagaaggtccagaactcgcagtccgaagccttcaggcgatccatcaatacttgctggatcttctggcgcacttcggtggaatagatgtcgcgtggcacgtaggccaggcagtagcagaatcgaccgtacgggtctttgcgcaggaacacgcggatcttgttgcgttcctggatctgcacgatcgacatcacggtgctgaacagctcgtcgaccggggtctggaacagatcgtcacggggcagcacttcaacgacttgcgccaactccttgcccaggtgcgccttgggctggaagccggagcggcgctcgatttccgcgaccttgcggcggatatacggaatcacccgtacgctttcgccgtacaccgacgaggtgtacaggcccatgaaacggtgttccttgatgaccttgccatcggcgtcgatttcacggatcgacacatagtccgggtaggctggacggtgcacgcggcttgggtgcgcggccttggcgaacgaaagcatggtcggttcacgcaggtaggcgacggcatagtcttcgatacgcaggtcttcggcggtgagcccggcgcgcagcagtttggtcagaccgaggaaggagtcggcgtcatattcgatatgaccgccatccgcctcgtcacgtaccacgaactcttcatagccgaggaaggtgaagtggttgcccaccagccattccaggaagttcttgatctcggccttttcttcgccgtcgatggcgaactggcttgcgtcgataccggccagcaggtcctggaccttggctttcatcggctcgaaatcggccacggccacacgcacttcacccaacacctgctcaagctctttgctcagcacgttcagttcggcggcgttggcgcaacgatcgatttccaggtacatcagagattcttgctggatgccttcgccctgggtgccttttggcaggatttccagcaactcgcccttggcgccacggcgtacgctgagcacggtggtctgcaaggtgtggatgctgtagccacggcggttcagctcggtgcggaccgagtccaccaggaagggcaagtcatggtgcagcacttcgaccgcggtgtgggtcgactgccagccatgacgttcgtaatcggggttatagacccgcacttgcggttgggtgtgatcaaagcgctcaagcaggcgccacgcagagagggtgcaaccggccaggtcggaaaggcgacgctgggtcagttcgtccagggaaatgatgccgaagaattgttcagcgaacagcgccacttgtggcagtgcctgttcactgatgtgctgcgccagtgccgcttgcagttgatgctggaagtcggccttgctggctgcggtgaaaaacgccatctgtggtactccgctcgggcttgttattgatggaagcgtcgcgtgttatccccttgcggggagaccgtcagcgctgttcgctgggtgacgagtaaagcaccataaacgaatcagggtgacaggtgggtgaagctggacaagacaatgaggtcacatacaacttccataagatgtgcacctagccgggtgacggtacgacgggcaggtcaggcgccaggctcgtgcacatccgttgcgcagcttaacgagtgtaggaagccagctgcttgcgacgctgcgacatattcggtcatcggtaagcaggcgccgggttgcgacttgggcaacccgtcattcccggcagaaaatccggctacttcgacgccggcgagtatcagaaatgaccgatgttgcccgtcaggtcatgcactgggtctgacacaggaagcagcacaaaattcgccgcaatggcacaattgcccgcatcacgccctaccccagacaggattgcccatgctgcaactgaaaaccgacgccctgatggccacgccgtgcgacgacgaagaagacaacatggccatgctctgctgccacggcaagaacggcgagatgttcatgctcacccgttacccggacgaagacgaagtggaattgacctgggactacgagccgtcgacgctggatgggctgaaggtcacgctgagtgacaccatcctgctgatcgaactggctgccggggatgccgatgccctgggtggcaaggaccagttgcagattacccacgccaccgctgcgtcggacctggtcgaagtcgagcaaaccctgcaaaacatcctgaaaggcaccggcactttcacccgaatttaaacggcacccacaatcaaatgtgggagggggcttgccccctcccacatcgaccgtgttcccacacaaatttcctacaagatttgccaaaaatacccgtcacgccgttagtcgccacccccctccatgcattaaagtagacgccccaggccttggcatttttcacaaccccaaggctcatctctccaggaaccgtcatcgatggaacatcgtgaagcgctgcttgcgctgcgaacctttctttctacgcagattctcggccaggaaaaactcatcgatcgcctgttgatcgcgctgctcgccgacggccacatgctggtggaaggcgcgccgggcctggccaagaccaaggccatcaaagagttggccgaaggcattgaagcgcagttccatcgtatccagttcacccccgacctgttgcccgccgacatcaccggcacagagatctatcgtccggaaaccggcagcttcgtgttccaacaggggccgatcttccacaacctggtgttggcggacgaaatcaaccgtgccccggccaaggtgcaatcggcactgctggaagccatggccgagcgccaggtcagcgtcgggcgcagcacctatgacctgtcgccgctgttcctggtgatggccacgcaaaaccccatcgagcaggaaggcacctacccgctgcctgaagcccagctcgaccgtttcctgatgcacgtcaagatcggcttccccgacgccgccgtcgagcgacgcatcctgcaacaggcccgtggcgaagcgctcaacggcgaaaccaagccggaacgccgcgtcagccagcaggcgatcttcgccgcacgcaaggaaatcctcggcctgtacatggctgacgccgtggaggaatacctggtgcagttggtgatggccacgcgcaccccggccaagttcgacccggagatggccgagtggatcgcctacggcgccagcccacgcggctccatcgccctcgaccgctgcgcccgtgcccatgcctggctggccggtcgcgactttgtcagcccggaagacatccaggcggtgctgttcgacgtactgcgccatcgcatcatcctgtcgttcgaagccgaagccgccggcatcgaccaggaccgcgtggtgcaacgcattctcgacgtcgttgccgtcgcttgaaacccatgaacgccagcgatggggtccgcgtcacgctcagcgagttgatcgagatgcgccatcgcgtgcgcgaagtgcagctgttttccaccccgagccagcgcagcccgttgatcggcctgcaccactccaagctgcgcggacgcggggtggacttcgaccaggtgcgcgtgtaccaggccggggacgatgtgcgcaccatcgactggcgcgtgacggcgcgcacccaggagccgcacaccaagctgttccatgaagagcgcgagcggccgatctttatcatggtggaacaaagctgccggctgtttttcggctccgggcagatgttcaaggcggtgctcgcagcgcaggcagccagcctgatcggctgggccgcgctgggccacaacgaccgcgtgggcgggctggtgttcggcgacagcgagcactacgaaatcaaaccccggcgcagcaaacaaagcctgctgcaactgctcaaccgcctggtgcgagtcaaccagagcctgaataccgagagccgccccgaagccgacgccctcggcatggccctgcgccgtggccgcgaagtgttgcgccccggcagcctggtgattgtgatctgcgacgaacgtgcgctgaccgagggcgccgagcaacaactgagcctgctgtcacgccactgcgacctgctgctgctgccgatctccgacccgctggaccacgccctgcccgccgccgggctgctgcgtttcgccgaacgtggtgcgcagttggaactggatacgctcaacttcgacctgcgccaggcctacaaggcccaggccgaagcgcgcattgcgcgctgggaactgctcgcgcaaaagctgcgtgtgctgttgatgcccttgagtacccagagcgaaatggtcgagcaactgcgtgaatacctcaacccgcaacgcccggttaaaaaacaatgagcagcctggaccaactgcagccgctgatcgccccgcccgccatcggcttctggccgcctgcgccgggttggtggctgttgctgctggcgattccgctgctcggttggggcctatggtcgctgcgccgcttcctgccggcccgccgccccgtggcgcgcgccgaacaaccgctggacccgctgcgcattgccgccctggcggaactggcgctgatgcccaaaccctacgacggcgcgcctgccggcgcctggctgcaacagctcaacggcctgctcaagcgcctgtgccgcaacgactacccctacagccagagccacaccctcaacggccgcaaatggctggcattcctcgacaaccgctgccccgccgccggcctcacgcgctggatggtgttggtggaaggcgcctacaaacccgaatgcaaactcgacgacaaggccatcgccggcctgacccaagcggtcgatacctggattcgcaaacatgtttgaattcgcctggccgtggatctttgccctgttgccattgccctggctgatgcgcctggtgctgccggcagccgacagcggtgagcccgccctgaaagtcagctacctcagcgacctcgaaggcctggcccgccgccgcgcccgcgtcaacctgccaggctggcgccagcaagcaccgttcgtggtgctgtggttgctgctgctgaccgccgccgcacgcccggaatggctcggcgaaccgctgcccatcgccgccagtggccgcgacctgctggtggcggtggacgtgtccggctcgatggattttcccgatatgcactggcaggacgaagacgtgagtcgcttgagcctggtcaagcacctgctcggcgattttcttgaagggcgccaaggtgatcgcgtcggcctgatcctgttcggcagccaggcctacctgcaggcaccgctgaccttcgaccgccgcaccgtgcgcacctggctggatgaagcgcgcatcggcattgccggcaagaacaccgcgattggcgacgccatcggcctggccttgaaacgcctgcgccagcgtccggcgcagagccgcgtgctgatcctggtcaccgacggcgccaacaacgccgggcagatcgacccgctgaccgctgcgcgcctggcggccgaagaaggcgtgaagatctaccccatcggtatcggcgccgatccggaacagaccggttccctgggcatcctcggcgtcaacccgagcctggacctcgacgaaccggcgctcaaggccatcgccgaagccactcatggccagtacttccgcgcgcgcgatggcgaagagttgcaagcgatcaagcaaaccctcgacaagctcgaacccgtcgaacaacaacccacccaggcacgccccgccctggccttgtacagcgcgccgctggccctcgcgctggtgctgagcatgttgctggtgatccaggaacgttggccgaacaacgccctgcaacgcgtgttcaataaactgtcgagcaagggcatgttcctgcagcaacacccggaatggcgccaacgccttaaacgcctgcgtttgcggaggcgtcgatgatcgacctgtggccgcactggttccgtccctggtggctgttgctgctgccgttgctcggctggctgctgtggcacctgtggcaccggcaaaagcgcgccgggcgctggcagatgatcttgccgccggccttccacgcggtattgctcagtggtggcaacggccgcgagagtaaatcgccttgggtggtgctcggcatcgcgtggctgttggcggtgctggcgttgctcggccccagttggcaaagggttgaacagtccagccagaagccgtccgacccgttggtggtactgctggaactgaccccggaaatgctcgccaccgacagcccgcccaaccgcctggagcaggcacggcgcaaactgtacgacctgttgcaggcgcgcaccgacgcgcaaaccgccatcatcgtctacgcgggcagcgcccacacgctggtgccgctgtcggacgacctggccaccagccgcaacctgctggaagccttgcgcccctcgatcatgcccgaaccgggccaccgcgccgacctggccgtcgagaaggcgctgggcctgctcaagcaaggcggcctcggccaggggcgcctgttgttgatcggttcttcgttgtccaaacaggagcgccagggcatccgcctgctgctgcaaagcggccaggcgccgagcttgtcgatcctcggcatcggcagccgcgagggcacgccggtgacccaggagagcggcgaattcctcaaggacgaacaaggcgcgatcctggtgccgcgcctggacagcccgaccctcaaggccttcgccagcgaaatgggtggccgctaccgcgctgcgcggctggacgacaaggacctgcgccagctcggcgtgctcgacccaccgcaagccctgcgcaacgatggccagttgctgcacctcgacacctgggccgaccagggttactggctgctcctgcccctgctgctgctggccgcctgtgctggccggcgtggctggctgttctgcctgccgctgctgttgttgagcgcgccgcagcccagctatgcgttcggcttgcaggatttgtggttgcgccccgaccagcagggccaatatctgctgaagaaaaaacgccccgccgaagccgccgaacacttccaggacccgcaatggaggggcgtggcgctttacgaggccggcaactatgccgaggccatcaagctgttcgccgagggtaatgacgcctactcccactacaatcggggcaatgccctggcaaaatccggtgaactggaagccgccatcgacgcctacgagcaagccctcgaagcccagcccgatctgcaaccggcgctgaaaaacaaagcgctggtggaaacccttatgcaggaacaggcccaaccggagccgcctcctgcggcaaaaaacgaggatgacgaaaccacccaacccggccaaactgcgcaaccgggcggcacggggcaaaacgccacggggggcgaacagtcatcccaaggccagggcgaagccggcactggcgacacccagcccggcaacacgccgcaaaccgcgggcaatgaagtgccgggcagcgaactgggcgacgaacagaccactaccccgccgctgcggcccaacgatgccagccttgacggtgaacatcgccaggccctggagcaatggctgcaggagatcccggacaaccccggagaactgctgcgccgcaaattctggtacgaacagcaacaacatcaggacaagactcgatgagccgccgcaccaccctactgtttctgctcgccctgtcggcaggccacgcccaggcggcgagcctggtcgccagcgtcgaccgcagccgcgtcaactccggggaaacggtggaactcacggtggaatccagcgacgtgacccagttcggcaagcccgacctgtcgccgctggatgcacagttcgaagtcagcggcacgcggcagatcaaccagctcaccacgctgggcggcgacaaccacgccaccacgcgctggatcatcaccctgctgccccgggaaaacggcacggtggtcatcccgcccctgcaagtgggcgaacacaagacccagccgatcagcctgcaagtggtggaaaccgccagccagaacactgctgccgagctggcgccagtgtttgtcgaggccaacctcgaccagaccagcgtctacgtccaggcccaggcgctgttgaccgtgcgcgtctaccactcggtgtcgctgtatgacgacagcagcctcacgccgttgcagattgccgatgcacgcgtggagcagttgggcgagtcgcgcacctacgaaaaggtcatcaacagcatccgccacggcgtgatcgagacccgctacgccatctacccgcagcacagcggcacgttggcaatccctgcgcagactttcagcgcgacgctggtggaatcgcgcccaccccaggaaaacaccctgcaaggcaccaagccgggcaagttgatccacgtgagttccgcagagctgccgctggtggtcaaacccaaaccggcgctgtaccccgccgatacgccgtggttgccggcacgcagcctgaccctgagcgaaaactggaaccccgaacccgagcacgtgcaagtcggcgactccctgacccgcagcctcacggtcaaggccgaaggcctgtccagcgcgcaactgccggcactgcccagcaccgaagtcaacggcctgcgccgctacccggaccagccggtgctcggcaaccagaccaacgaccgcggcctgatcggcagccgcgaagaccgggaggcgctcgtgcccacccgcgcaggtaacctggaactgcctgccgtggacgtggtgtggtggaacacccacgaagaccacctggagcgcaccagcctgcccgcccgcaccgtgcaggttgccatcaacccgagcctggccgtggatacccccgccacaccgacggtgatcaccgcaccggacgatgagcgcctgtggctatggcaactgagcacgctgatcctggcctgcaccaccctgctggggtttggcctgtggtggcgtgcacgtcggcaaccggccgtgcagcgcgccgcacaaaccggcccgagcccgcgcaccctgctcgatgaccttaaacgcgccacccaggccaacgacccccaagctacccgccaggccctcgacgcctgggcgcggcaacagccggaaaccctggcggatatggcggcgcggtttgtgccgctgtcggacgcgttggacgggctgaatggtgcgctgtacagcgagagtgggcatttctggctgggagaggacttgtggcgtgcggtgaaggcaattccgatggctgagcgtgaggtggatccgacggcggataccaccagcttgccgccgctgtatcccaagtagccaaggtgactacttaagataggacaggcgtggccgataaagcgatgtagctttcgattaatggagttttttaaaatggccattacgttgaatgtttcctatccgcctttaagtaagcagacagacgcttacgccatcaaaaacccgcagcaagtcacgaatgccttcactattaccgaagcctccgaggcggcggatacattgaagcttggcgatcaggagaagatcagtcaacttaaggagtttttgaaagattatgatatgacgtcaatcagtacggatgagcttaagaaagtcggtagaaggctctacgatgacggaatgatcagccaacgcgcttttgggatgttcatttcgggtgatggtgcatcagatgccaatggtcgccaaacaaacacccacgtaaaatttaatgccattgccctattcaacgagaaactggaagatacgcgggcttttttcaaaagtgaaccaatggttgcaatgcaagacggtgccatggatcacttgcaagggatggtcagcgcaaatcaagctgttggtgcattggcgtattttgtcaagtccgctaataatgatttatcgataaatgagtacgcttgaatttgatttatgagtcaaggcgcgccaggttcaacctgacgcgccgcctgctcatctagcgtccgtatctcaccgtacctgaataggatttagacgcgctggtttcgtttttcagccttacacgataggtaccgaatggccccacgtaagacgcgttagtgccgatactgaatgacactctgctccaggatgagcctacttcacgctcgataaaaatcgccggagcacttcccgctcctcccgctgaaaccgttgcatcgatattcgcggcagaacagccattggctccggttattttaaatggaccatataccgtaatctcatcattgggctgcattatcccggtataactatcagcaatattcaaacacaacgcagatgcctggaatgaaacaagcatcaatccagcaagcggcaatgcaataaggcttttcataatagtctccatcagtattaagaaaacacaaaagcgcatcacgcaaggagcgcgtcaattgaccactccacgcttgccagactgcatgaattatttatcaaagtaagccagccgcttcctaaattctggaaggaaaggcctgtcattttttagtgtaggaacaagtaaggcgcgtcctaatcctgcctcccacttataagatcggtatttaatagcattttactttgcgtttttttcagataaatattctaacccttggcacggggcggtttactcgcgaatgcggtgtgtcagatagaaatgcactgcctgacccaccgccacccggagcaagccccctcccacattgaatctgcgtcgcctgggggcagcagggtcgcattacaggtaaactcccctccttttcatctattccacggagttcgccttgcgtctgtttcacacctccgactggcacctgggccaaaacctccacggccaggaacgcgacttcgaacacgcctgtttcctcgagtggctgctgggccaactcaagacccatcagccggatgctctgctcatcgccggcgatatcttcgataccgtcaacccgccgctcaaggcccaggagcggctgtatgacttcatcatcagcgcccacgaacaaaaccccaagctgaccatcgtgatgatcgccggcaaccacgattccggctcgcgcatcgagctgccggcaccgctgatgcgccgactgcgcactcatgcgctcggccgcgtgttatggctggatgacggccagctcgacgccgaacgcctgctgatcccgctgcccgatgccaaaggcaagattgccgcctggtgcctggctttgcctttcctgcgcccggcggaagttaccggcgcgcacctgggcgacgattacctgcgcggcatcggccaggtgcatgaatggctgatcgctgcggccaatgccaagcgcaaaaaaggccaggcgctgattgccatcagccatgcacacatggccggtggttcggtgtcggaagactccgagcgcagcctgatcatcggcaatgccgaggcgctgccggccagcttgttcgataaaagtgtcggctatgtggccctcggccatttgcacaagccgcagaaggtcaatggcgaagagcgtattcgctacagcggttcgccgatcccgctgtcgttttccgaaatcggctacaagcaccagatcctcgatgtggtgttccagggccaatgcctggtgagcgtcgagcccatcctgattccgcgttcagtcgacctgcaacgcctggaagccgtgcccctggccgatatcctcaaggccctggccgagttgccggacatcgacctgctcgccgaaacccaacgccacccctggctcgaagtgcgcgtcctgctcgacgaaccgcaacccgacctgcgccagcaaatcgaagccgcgctgcaaggcaaggcagtgcgcctggtgcgcatcgccgccgagtacgccggtaaaggcccccgtgaagacgaaggcgacgaccgcctgatcgaactcgaccagctcacgccccaggaactgttcagccgcgcctggcaggacagctatggcagcgaggtagatgaacagaccttgaaggacttcgccgtgttgctccaggaagtgcagcaagagggggaacagccatgaagatcctcgccatccgcctgaaaaacctcgcttccctggccggcccattcgagatcgacttcaccgccgaacccctggccagtgcggggttgttcgcaatcaccgggccgaccggcgccggtaaaagcaccttgctcgatgccttgtgcctggcgctgtttggcgccgtgccgcgcctgggtgataccggccaggcgaagatgccggatgccgacagcgacatttccatcggtgacccacgcaccttgctgcggcgtggcaccggcggcggttatgccgaggtggattttgtcggcgtcagtggccgccgctaccgcgcgcgctgggaagccaaccgcgcccgcgacaaggccagcggcaagttgcagaacagccgccagagcctgatcgacctggacagcgaccaactgctggccagccagaaaaccgaatacaagacccagctggaactggccctgggcctgaacttcgaacagttcacccgcgccgtgttgctggcgcaaagcgagttcagtgcgtttctcaaggccaacgacaacgagcgcagcgaactgctggaaaagctcaccgacaccgcgctgtacacccagcttggccgacgcgccttcgacaaggccaaagaggcccgggacgcgcacaaacagttacaggaccaggccaccggcgtggtgccgctggccgctgaagcccgtgccgaactcgatcaacaattcgatgccgcgcagcaacacctcaggacccagcaggcccaactcaagcagctggagcttcagcacacctggctcaaggaactgcgcgaatggcaggaacgccaactcgccgccaccgagcagcttcagctggcgcaggccgagtggaataaccaggacgcgcagcgccaggacctgagccgcctggaacagttggcgccgcagcgtcatctgttcgtgcgccaggcggaactcggcacacagctggcgccgttggcggcgcagattcagtcgcatacccggcaacaagacgaactacacacccgccaggaacaggcccggcaccaacaaaccaacgcgcaaaccgccctggctgaagcgctgaacaaccaggcggatgccgcgcctttgctgcgccaggcgttcgacgaacaaagcaccctcgcgcacttgaccaaagagctggccaagcgcaccgaggacaaacagcggcacgcaagcgcctgcaccgaaggccaggcccagctcactggcctgctggaaaaacagcaccaggtcgcagagcgcctgcaacgcctgagtaccgagcttgagcgcagcgccgcccttgcgccgctaagtgatgcgtggaccgcctaccgcgaccgcctgcagcagctgatgctgatcggtaaccgcctgaacaaaggccaggccgaactgccgcaactggagcaacgtgcaagcagcgccgctgaacagttcacccagcaacgcgaagccctggacttgctgtatcaggaggccggtgccgagcctcacgccgtggccgagcagatccaattgctggccagcctgctgcaagacaatcgcaaacagcagcgagccttcgaagacctgacgcgcctgtgggacaaccagcaacagctggaccagcaagccaccagcctgacgcaaaagctcaccacggcccaacagcaacgcgaacagttgaaccagaccggcctgcacaccaaggccgagctgaccgtcgcggaacagacgctgaacgtgaccaaacagctgctggaacgccaacgcctggcccgcagtgccagcgtcgaggaattgcgcgagcagttgcaggacgaccagccctgcccggtgtgcggcagtcacgaacacccgtaccaccagcccgaagccctgctgcaaagccttggtcgtcatgacgaaaacgaggaagccaccgcgcagaacgcggtggacaccctcaaggagaaactcaccgagttgcgtggcgaagtgggcggtttgatcgcccagcagaaggaatacctgcaacaacaggaacacctggcgacgcaacagcaagcgctgaaaccgagcctggatgcacacccgctggccgcatcgttgttcaaccaagaggccgccaaacgcagcgcctggcttgagcagcaactgagccaactgacccaaagcatcagccaggacgaacagcgccaaggcgctctgctcaacctgcaacaaaatgccgggcgcctgcagcagcaactgcaagccgcccaggaggcaagccagcaggcccgccaattactggtcgaccagcaacgcgagttggccagtgaccgcgaacgccttgagcaggaactgagtgccttcgccaacctgctgcccccagacaccctggcaggtctgcgcgccgagccggccgccaccttcatgcagctggaccagcaggtcagccagcgcctggaacagctgggccaccagcgcgacgaattggccgagcaacaggaacgtcaacaggcgatcgagaaggaacagacccaccagcagcatcgccagcaacaactcgacgccctgctccagcaagtcaccgagctggcgagccaacagcaaacggctcaggaaaaactcagcgcgttgctcggtgagcacaccagcgccgaacagtggcagcaacagctggatcacgccgtcacccagtcgcgccagagcgaaaccgacaccaaccaacaactgcaggacatccacaacgcgctgatccaactggccgccgacctcaaggctcagcaggaacgcgaacaggcattgcaggccgaacagcacagcctcgacacgcgcctgcacgactggcgcgccctgcacccggaactcgacgacgccggcctcgaccgtttgctggcctacgacgacgcccaggtcagccacttgcgccagcagttacagcacagtgaaaaagccgtcgaacaggccagggtcctgctgcaggaacgtgagcaacgccttgccgagcaccaggcccaacacaatggcaacctcgcagccaatgagctggacaccgccctggccacactcaaccagcaattggccgaggccgagaaacactgcgccgaactgcgcgcgcggcagtccgaagaccagcgtcgccaggacgccaaccaggcctttgccgagcagatcgccaaggcgtatgacgaatggcaacgctgggcgcgcctgaacgcactgatcggctcggccaccggcgacaccttccgcaagatcgcccaggcctacaacctcgatctgctggtgcaccacgccaacgtgcaactgcgccaactggtacgccgttaccgcctcaagcgcggcggcagcatgctcgggctgctggtgatggacacggaaatgggcgacgaactgcgctcggtgcactcgttgtccggcggcgaaaccttcctggtgtcgttggcgttggccttgggcctggcgtcgatggcctccagcacattgaagatcgagtcgctgtttatcgatgaaggcttcggcagcctggacccggaatcgctgcaactggcgatggacgcgctggacggtttgcaggcccagggccgtaaggtggcggtgatttcccacgtgcaggaaatgcacgaacgcatcccggtacagatccaggtcaagcgccagggcaatggtttgagcacggtggaggtgaagtgagcgaagcgctgctgtattcgttccggcgctgcccgtatgcgatgcgggcgcgcctggcgttgcgttattcaggtgtgcccgtgcagatcatcgaggtgagcctcaaggccaagccggccgagatgctggcgctgtcgcccaagggcacggtgccggtactgagcgttgacggacgggtgattgaagagagcctggagatcatgcaatgggccctggcccagcacgatccggatgattggctgctgcagggtgacccggcggtactggcactgattgccgagaacgaccagggcttcaagtatcacttggatcgatacaagtacgccgaccgctacccggaacacccgatggaacactatcgggccgagggcgcggtgtttttgcagaagctggaaggcttgctggcggaacgcgcgtacttgctggcagagcatccgagcctggcggacatggccctggcgccgtttgtgcggcagtttgcccatgtggatcgggagtggtttgccgggacgccatatcaacggttacaagcctggcttcagcgcgtccttacttcaccgctatttatcgccgtgatggcaaaaccctgaggccggcacaatcaaatgtgggagggggcttgcccccgatgacggtggatcagtcagctaatctgtagctgacccactgctatcgggggcaagccccctcccacatctgatctcagtgatctaccgcttagtgctgggtcttgtgatccagtgcggcgtagaaattggcgctctgttgcaggtatttctgggtgtaggcgctggtgctggattttttgccggtcacttccacgctggctgcggcaggcagggcaacagtggcagaaacagcggaagcggcgatgatggagaagaggttcagattcatggcggtaacccttgtgttcgtttggttgagtggccggggaaggccttggaaccaaacttacgcccgagggctgaaccttagaaatgctttgaaacagtagccgctattaacagaattaatagaaagggtcaggccccgcgcggcggggcctgtggcttattgacgcaccaggaacttgaggtcgctgggcgcatcaatcggcaatttctgcacggttttacccagcaggccggtttttgggtcgcgttcgactacgacgatttcgttgcttttctgattggcgatcagcaggaaccgaccgctggggtccaggctgaattcgcgcgggtggtcaccgtccaccgagcgacgttgcaactccttgaggtgcgcggtggccgggtcgatgctgaacaccagcaactggttggccgtgccacggttgctcacgtagaggaatttgccgtcactggaggcatgcaacgcggcaccggccttgtcggacaccggctgcccggcggcgaagtccaccagttgggtctgggtcaactggccgtccttgtagtcgaacaccgccacctgcgcgctcatctcggtggtcaaccaggcgtgcttgccatcagcgctgaacaacaggtggcgcgggccgctgcctggcggcagttgcaccgaggccgggttggccggggtcaatggcagttcatggttggccttggggtcgtagcggtaggcaaacaccttgtccgcccccaggtcctgcacaaacacgtacttgccatccggcgacgacaccaccgaatgcacgtggttcgacgcctgccgctcagggttcacgcgactggccgggtgcccactcagttgcaccggaggcgacagcttgcccgtggcgtcgaccggcagcaccgccaggctgccgcccgggtcttccaccaccgaatagttggcgaccaataggtagcgcccatcggcggccacgctggaatgggtcggctcattgcccaggctctgcacctggttgaccagggtcagttggtgagtctgcggatcgatgctgtagctgcttacgcgcccgaccgggtctttctgcccgggaccgttctcgttgaccacaaacaggtgcttctggtccttggagatcgtcagccaggacgggttggccgctttggccgcgagcaccggtttaccgctgaattggccagtacggctgtcaaattgcaggcgatagatgccttcgctgctgccggcggtgtagctgcccaccaacagttcataggtgtcggccggcgcagcttgcaccgacatcgcgcccacgctgccggccatcagcagcggccagaatttacgcatcatcatccgcttcatcctcgtcgttattgttgccggtgaaggcgcgcatgcagatcaggcggtgctcgcccgaatcaccggtaagggtccagctttgcaaggtgtcatcgaacgtcgcggcgtttacctgttccaggctgaagcgccagcgtttttctgcacggccgtccatggcggtgatcagcaatttttctttatcgagttggaaatcgaaggcatgcagcccatcgatttcaagcatgtcgctggtttcaaggacggcaggcaaattctcagtcatcacagtctttcatcaggttcaaagcgctaatcataggccagtttgctgccggggcctaaaaccatagcgggctaccgcatgctggcaacgccgggcattaccttgcaaggacgcattcttatccgacgtaaaggaattcccatgcccgcacagcccaataccccagcggcaaaccccacacgacaagcggttgaagcgcagtttctcgggcgcccgacgttgcgcaccgtcaccgcgcaaatgctgggcacccacctggtggaaaagtacccgcccctgacgctgcccgtcaccgatcttcggctggccgtaccccgcgaaggcggtggccgagtcttgctgcctttgctggacgtcgcgctgaaccatatcgccgacggcagttttcccgaattgacggcacgccagaacctggattgctacctgagcgatgcaaccggcactcggctcagctatcaggtcaacggagatcgtcgcgacttcgacctgcgggtcatcgaggccatccttcgggagctacctcacgtactgttcatcggttttcaagaagcactggccgcgtattggggacaagacagtgacgcagggggcagccgctggaagtggctggccgatgtgctgcagggcgtgttgctcgacgtcgccacgcgccagaccagcgtcacggcgcaacaccttgaaattctcaacgccttgaaccgctatccagaccgggcaacccgtgcgctcggccccgcccccgcgaacgaggtccacgcctacaccctggaaacgcatttgcagcgctcgggcaagcggctcaccttccaggccaccgagatcctggtggttcgcgcagagcaggtgttgttgtatcgcttatccggtgaggttgagccctaccccgacctggacaccttcggccaggcatggggcaaacacgtgcaacagcgtttcactgccgaccagatcacctggcagcagtatgagccggacgggaatatttttgaggtacaggccgcgcttatccttaaccagcaactggacgatctcgccgccctccaactcccggcccaaacgacggtacaagcgctggaagagctgtttgcggtgaccaccgatcccgcgcagtggctggcccaatccagcgccacgccgctggcaaccctggcatccatccaggcagccctgccagccactctgcaagacgccagcgcggccaaccggatggcctaccgccaaaacctgctggaacacgccaacatcaagcgccaggtcctcggcgactcagacttcgatagcctggaaaccctgcgcggttatgccaccgcgcatttgaaccaacagttgtgcatggaccgcgccgttgcccacggctggcagcgtgcctgcacccttgaggcgctgtctgccggctaccaggccgacgatctggaactgacctttcatgtgccggtgggcaccctcgaagggggttacattgaaccggtcgtcatgagcctggttgacctggcgctgaagaacctgtccggccgccccaagggccgcatgaccgtgcgccaccgcacgggccgcgagatcgaaacgtggttgacgcccgactacctgcttaaactggtccagcgtgttgatatcggcaaaaactatcccgcctacctgcgccgagagctgatgggggatacccaggccgcgcgtaaacgccaacagctgttcgagcaactacggcccattcatttaaagacccacgcgctggagtgcttgatcaatggccaggcgggcctgactcaacgcggctttcactgtgtcaatgcactggtaaaccctaacccgctggaacgtcgggttggtgacgacgaaattgtgatccgcccgctggcctttgtacgtaaaccaggcgccacggccgatgtcgtgcgcaacatgttcatcattgaaccgcgcaatacacaatcaggcccgcacttgctgtatcgcccggcctatcccgatgcattgttggagtacgccaaccgcgaccaactgctggccgccatcgcgcaaccgggtaccctgcaggacagtgtcctgacctggatgactgacaacgccagaggcatctacagccacggtggcttcacccagcctcactctgtacgcgtgggtatcggttcggagttcgatagcctgcccagcgtgcccaagcccgcagagctgacgcgcgccgacgacgaatgcaacgacgaactgcttcaggcgctcaacagtggcagcctcatggaatacctgttcggcagtgaaacccgacaactgttggatcaggctgaacaagcgtccacatccaacagcgaaagccgctgggcactgatcctggaaggcctgcaactggggttcaacacactactgctggtcgtgcgtggtcccttggcggcaatcggctggctgatgcaggccacacaaagcctggtgaaagacctgccggcactggaaagtgacgatccgaccgccagggagctggcgtgggttgatctgctgctcaatgtcggcatgctgctgttgcatcacggatcgctcagcgcaccccgcgaaacgcctttgcgcgctgaacgcgccacgactcccgcgccgttccaacgacgctggcctggccaatcaatcggtcgatcggctgtggttgaacggggggctgtcgggctgccttccgaaccgcccggtggtggccgcaccttgttggactttgaccgctcattggcgggcgacggcgcatcggccaggcttttgcagaagctgctggccgtcaacgtgccctggccaacccccattcccgagccggtttcccttgggatgtatcgcggcttgtactcgatcaaccgccaatggcatgcctcgctgggcggcctgctattcagggtcagcatcgtgccgggttttggcgaggtcttcattattcatcctctgaagccggaacacccgggcatccagctgaaaaccgacggccgcggccattggacgctggaccgggggctcaagctgctggggggtggacgcaagcgagtgcaagagctgcgcaatgaaaagcagcttgagaatgaaaggttgcaggcgcgcacgctccaactcgttcaggaagcgcagctcctcacggcgccgatcgatcaagcaggcgcccagttgccacccgccctcaaaagcctggagaaacaactcaagaccctgcaaatcattcaggatctgctgcttaaagcttccgatacacaacgcccgagcctggaagtacgccaacagactgaagtccaggaatacaagcgcctgcgcaatcagttcgaaacgctgctgcaaaacgtcgaaacccaactttcccaagccttgcccgtgcgcttcgagctagccaccttgacccgtcaactagaggccgccgcgattgctgacctgcccctgatcaatccatcaaccatcctgaaagaggtctggaatcaacagttgtttctgcacaagatgcaattggaagcgttgggattccataccgcgaccgaagcgggcgaacccttggaggcgtggaacaaacgcatgcagccacgaatagtggcgggagacttggccctcgtcgacgaaaacctgcggatggtcacgggttatatcgattacctcgaacacatggccgtgcattccgccacgatggaagccacccttgagtaccttgggcaagggtcgggggccgcgcgggcagtgcgtcaagaactgctggcaagcattccagtggttgaattgtttttctccgacaacctgaaactcagtgctttggaactgctgaccggcctgagccagctacgcttcaagatgcattcacaactttctgcgttgcagtggtattacaaggcccgttatcaagtgtccgggctggacataagcctgaaatcccacctcgaggtacgtagcagctccgagtacccactggacgagcaacgcaatgtctacgagaccgtcctcgacaaataccagcatgccgaattcgccctccaagccctcaagagcctcaaatccgacgctttaggcccggaagccgagcgtgtgctcaaaggccttgaatacgccaaggcgttggcgcaaaacgaactggaatcggtggttagagagcaggaagacctcaaggtcgaactgccgttatccaaaaccctgcgcgccaagcctgcggcaaagcgcgtgttcaagacccgtaaaaaggaatacctgatcggcgaactcaagcccgccgacgcgcaaaatgcccaggagcacatcaccatctccgacacattgctgggtaaaaccctggcttcgtataaccagcagacggatggctgggtctccatcgacgaggaagccagccctgtgccggccccacaggctcgctcactcgcggcgctcaaaagtgaagcccaggccttgattgaacagcgccaggacctggaacaactggtcgcggcggaccaggcgaagctggactcccccctcacccgccaggacgccaaccccggcgaatgggataagttgctcaacacccaagccaacaaactgaccgagctcgccaacgaaataaaacgcgaccatttcaacgcgcctaccgcccagaatctgatcgatgaatgcctggcacaggccaaggacatcaatcgctgggcacaacgtatctgcagcgaagcctacaaacgccagtggccgacaatggaaagcgtcgcttacctctgggaccaccagcagatcgatatcaacctcaccagccaggccgatccgcaacgcccgaccctcagtggcgacttcttcaccgaatacgcggtgtacgacaaggcgcaaaagccaccggtggtgctgtggtacgcgcacttccactatgctgccgctgacgctccacccgcgaattacacccgggcgcatctgaagttgccggagcaacgcaaactcacccagaaggatttgctcaaggcccatgtgcaggattatctgagccgtgtgaaggaccccgacaacgcaccggtgaccaaaattgtctatgtgctgatcaccccgccactggacaacctgttcctgaagatagcgcccaagcccaacgttcagtaaaccactggatgagaacctgttcctgaaacggtaacccgcaaaaaagccgcacactgtgcggctttttcaaaacgcgacgactcagtgcgcaaacaacgagttgcccttctgccccgccaacttctccggcttgatcaggaaccgcgccagcgccggcagcagccacaacgcaccgaacatgttccacaacagcatgaaggtcagcatcaggcccatgtcggcctggaacttgatggccgagaagatccaggtgcacacgccgatcgccagacacaggccggtgaacagcacggctttaccggtggacttgagggtctggtaataggcttcttgcaacggcaaaccggcacgcaggaagctttccaggcggctgtagatgtagatgccgtagtccacgccaatccccacgccaagggccaccaccggcaaggtcgcgaccttgacgccgatacccatgaacgccatcagcgcgttgcccagcaccgaggtcagcaccagcggcagcacgatgcacagcgtcgcggcccaggagcggaaggtgatcatgcacatggtcgccacgcacaggtacaccaggatcaggatggtcagttccgactccttgatcacttcgttggtggccgcttcgatcccggcgttaccggcggcgaggatgaattccaggccgtccctgttgttctccttggcaaagtcctgcactgcatgcaccgcacggtcgagggtttcggccttgtggtcattgaggaacaccagcaccggcgccagcgagcaattgttgttgtacaggccatcggcacgggcgatggagttgttcagcacatccgggttgcgcgacagggtttcccatttcaggttgccttcgttcatgcccttgatcatctgcttggacacggtcaccagcgagatcgccgactgcacaccttcggtgttctgcatcttccacatcaactggtcgatgggcgccatggcttcatagcgcgagcagccttcggccttggtcttgaccatcaccaccagcacgtcggaactggtggagtagttgctgatgatgaagttgttgtccttgttgtagcgcgagtccgggcgcagctccggcgcaccctggtcaaggtcgccgatcttcaggttctggctgtaccagaggccgccaccaaaggcgacaagcgccagggcgatggagatcggcgcgactttcgggttggcaaaattcgacagcaggcgccagaacgaatgttcgcgattcgcgtctttcttgctcttggcgatggcacgcttgctgatgccgacataggagatggccaccggcagcaggatcaggttggtgaacacgatcaccgccacgccgatggacgcgccaatcgccagttcgcggatcacaccgatgtcgatgatcaacagcgtgatgaagcccacggcgtcggccaggatggcgatcatccccggcaggaacagttgccggaaggtgcgccgggcggcggtcagggcgttgtccgcctcgctggactgcagcgcgatgccgttgatcttctgcacgccgtgggagatcccgatggcgaagatcaggaacggcaccagcatcgaatacggatcaaggccgaaaccgaagaagtgcatcaaccccagctgccagatcaccgccaccagcgtagtgctcaacacggcgacggtgctgcgcaggcagttggtgaaccacagcagcaggatcagggtgataacgaacgcgatgccgaagaacatcaccaccatgaccaggccgtcgatcaggtcaccgaccttcttggcgaagccgacgatgtggatcttgacgttggggttctgggcttcgaacttatcgcggatcttgtcttccagttcgtgggagaacttgcggtagtccagggccagtaacttgccctggtcctgcgggtccgggtaggactccagcagcggaatgtcgacgatgctcgacttgaaatcgttggccaccaggcgccctacctggccggacttgagcacgttgttgcgcagttgatcgagactttccggcgagccgttgtagctctgcgggatcacttcaccgccggcaaagccttcttcggtcacttcggtccagcgtacgctggggctccacagcgacttgagccccgaacggtcgacgccagagatgtagaacacctcgtcgttgatctgccgcagggtctccatgtactccttggtaaaaatgtcaccgtccttggcctccaccgagatgcgcaccgtgttgcccaggttggccaggtcgttacggtgttccatcatcttttcgatgaaggggtgcttgagggggatcatcttctcgaagctggtggacgggcgaatcaaagtcgcctgccagaacaggaaaatactcaccagcaggcagatgacgatcactgctggccggttgttgaagatcaggcgctcaagaaaggttgctttatcgttgtgatgactgctcattctttccccgcccttattattgttttacgagttcggcgccgttgggcgcggcgacgcgaacgccaccctgccccgccagaatcaagttgccgttgcctgccgccgtgacggacgacagcgaaatccggtccggacggttgaacacgctgaaggtcagaccatcgtcatggctgaccaccacgctgccaccgttgcccaccacgacgatggagccgtcatccagcaaggtcgcgcccgacaaaccaaactccagcgctccccgcgccgcgttcaattcgaccggctcccaggtgctgccaaaatccgtggagcggtacaggttgccacgcaagccataggccagcagcgtctgcggctgggcggtgccgatcacgccgaacagcgagccctcgtaggggccttcgagcttttcccaggtctggccgtcgtcgctggagcggaacatgctgccctgctcgccgacgatgaacaggccggcatccttgatgtgcgcgatggcgttgaggtggtactggtcttcgttgtcaaggcggtcgctgacgtcattccaggtcttgccgccatcggtggtttcgatcaacgcaccgtaggcgcccacggccaggccgtggttcgcgtcgttgaaccacacatcgagtaaaggtgcttcgcgcttgaggtcctggtattgctgggtccaggtggcgccgccgtcggcgctggcgaggatctgcgcatcatggccgaccgcccagccttgcttgtcatcgacaaaaaacaccgccgtgagcaattgccgggtggggactttggcttgggtccaggtgctgccctggtcgtcggaatagaggatgtgcccgcgatcaccgaccgccaccaggcgcttgcccgcgtggaccacgtcgatcatcaggcccttggcggccttgggggattcaatcgcaaacaccggcgttgcggcggtatcgctggcggccagtaccggtgtggacaacgcaccaccgaccagcaacgagagcgctgtggccagcatcgcaaccctgcgtgcggcgcgtgggcggcagacaacccaacccattacaggctcactcatagacctttctcccatttattattgttatcgcttgccttccggggccttgaaacctgcaatctagagcgcctggaggaagcaggggccatcctatcgggctttcgaatcgtctgacaatcggcgctacgttatcttttgttaactgaaggcatttggccccatggtgaatgtagctgcattcgccggggtgatcgccagcgcgcaaatgaatttttattccatctattgaattttaggaatttttattccattaatagccttcctgaaaacaataatccaaaggaccacggcgatgcgtgaactcggaatcggcttgatcggcacaggcttcatgggccgcgcccatgcattggcattcaataacgcccgtgcggtattcgaactgccggtacccctcaagctggccgccctggctgatgccgacagcgaacgcgcccagcgctgcgccaccgcctggggatttgcccaggcccatggcgactggcaggcgctgatcaatgacccgagcgtcgatgtggtagccatcaccacccccaaccatttgcactaccccatggccatggccgcgattgctgcgggcaaagcggtgtactgcgaaaaacccctggccgtcagcctggaacaggcggacgccatgcgcctcgccgccagtgccgccggggtggtgacgcgggtcggctacaactaccagcacaacccgatgatcacgctggcgcggcagatgattgccagcggcgacctcggcgaaatcatcagtttccagggcgagttcagcgaggacttcatggccgacccgacctccccgtggtcatggcgctgtgaggtcgaacatgcggggggcgccctggcggacctgggcagtcatttgttgtcgatggcccgttatctggtgggggatgtgacgagcgtatgtgccgacacccagaccgtccacggccagcgccctgccatcaacggcagcaccgagctgaaatccatcgccgtggatgaccaggtgcatgccctgctgcgtttcgccaacggtgcacgtggcacggtcagcagcagttggctcaagcacggctacaagaaccacctgagtttcgagatcagcggcacgaaaggcaccctggccttcgatcaggaacgcttgaatgaattgcaggtatgccgtattggccaggacggcttccagcgtttgctcgccggccccgccctgccaggttacgcggcgttcagcccggcggcggggcatcagttggggtacaacgaactgaagacgctggaggtgcaggagttgatgctggcgctcgcaggccagggtgcggatggcaccgactttgaggccgcgtgggaagtggagcggttggcgacggcaattcgcgtggcggccaaagaagaacgctgggtacacgtcgaagaagtttaacagccccgaaccttgtggtgagcgagcttgcctcgcgcggggcaagcccgctcactacaaaaagcaaagtctagcgcaaggcccggcgcaggactttgccgacggtggtcttgggcagctcagtagtacggaactccacgtacttgggcaccttgtaccccgtcaggtactcccggcaatgcgccagaatctgctcctgcgtgaggttcgggtccttgcgcaccacgatgatcttcaccttctccccggtcacgccatcttccacgccaatcgccgccacttcacccacgcctgggtgcagcgccaccacatcctcgatttcattggggtacacgttgaaacccgaaaccaggatcatgtctttcttgcggtccaccaggcggatatagccgcgctcgtccatcacaccgatatcgccggtcgatagccacccctcggcatccagcacctcggcggtcgcctccgggcgtttccagtagccctgcatcacctgcggcccgcgcacttgcaactcgccctgctcgccgatatcagccagctcgccgtcttcgcgcatgaagcgcacccaggtcgacggcaagggcacgccgatgctgccggtgaactccatctcacgcatgcgcgcaatgttgatcgggctgatgctcaccaccggcgaacactcggtgaggccgtagccctcgatgatcggcagcccggtgacttccttccaacgcttggccaccgccgtgtgggtggccatgccgccggcgatcaccatgcgcaggtcggaaaagtcccgcgcacagaactccttgttctccagcaagccgttgaacaaggtgttgaccccggcaatgccgttgaaacgctccttgcgcaggatcatctgcacccgtttcacgtcccgtgggttggcgatcaggatgttgcgcccgcccaggcacatgaacatcaggcaattcaccgtcagggaaaagatgtggtacagcggcagcaaggtgacgttggtttcctgcttgtcctggtccagttggtcacccacccacgccttggcttgcaacaggttggcgatgatattgcggtggctgagcatcacgcccttggcgtcgccggtggtgccgccggtgtattgcaaaaaggccaggtcgtccagatgcatccccactgggaaatggttgagtgcccgcccctgtttcagcacctggttgaagcgcaccgaaccgcgcaggttgaacgccggcacctgcttttgcacacggcgcaggatgaagttcatcgccgcgcccttgaaggtgccgagcaggtcaccgatggcggcgatcaccacgcgcttgacgctgctgccggtgatgactttttccagggtgtgggcgaagttctcgaagatcaccacggtttccgcgccgctgtccttgagcagatgcttgagctcatgggcggtgtacagcgggttgacgttgaccaccacggcgccggccaggatcgtgcccagcaggcagatcgggtactgcaagcagttgggcatcatcagcgccacgcgatcgccctgcttgacgccctgtgcctgcagccaggccgcaaaggcgtacccttgcacctgccagtcggcataggtcatttcggtgccgatactgacgtaggccacccgctcgcgaaacttctccaggtgctccaggaatacctcgcgcaacgacggatagtcctcgatacccgcatcgatatccgccgggacgccaggcaggtaagcgttcaaccagatccgttcggtgtgttccaggcttacagcgttcatggcagtctccttgttgttgtttttgatagagctacttttcgacgatggcggtaatgcccagcccgcccgccgcgcagatcgaaatcagcccgcgcccgccaccgttctcatggatgatcttagccagcgccgccaattgccggccaccggtggccgcgaacgggtggccgcaaccgagtgagccaccgttgacgttcattttggcgcggtcgatggcccccagcggtgcctccaggcctaggcgctcgcggcagtaatcggcgtcttcccaggccttgagcgtgcacagcacctgggcggcgaaggcttcgtggatctcgaagaaatcaaagtcattgaagctcaagccttcgcgctggagcatgcgcggcactgcgtaggccggggccatcaacaggccttcgctgccgtcgacgaagttcaccgcggcggtctcgccggtacgcaggtaggccagcaccggccagccgtgttcggcggcccacgcctcgctggccaacaacaccaccgaggcgccatcggtcagtggtgtggaattgcccgccgtgagcgtgccgtcctggcggtcgtaggccggggccagcccggcgagtttctccaggctggcgtcggcgcgcaggttgttgtccttcgccagtccgcgatgggggctgatcaggtcgtcgaagaagccgcgcttgtaggccgcttccaggcgttggtggctggtgagggtcaattcatcctgggccaggcgcttgatctgccagcgcttggccattgcttcgcagtgctcgcccatggacaagccggtgcgtggctcgccattgcgcggcagcaacggcttgaaaaacatcgatgggcgaaccttgagcaacgtcttcaacttggcgcccatgcccttggcgcggttggcggcgagcaaggtgtggcgcagggattcgttgatgccgatgggtgcgtcggaggtggtgtcggaaccgccggcaatgcccacctcgatctggcccagggcgatcttgttcgccaccagcaaggccgcttccaggccggtgccgcaggcttgctgcacgtcgtaggcgggcgtgtccggcgacaaggtggtggagagcagcgactcgcgcgccaggttgaaatcccgcgagtgtttgatcactgccccggcggcaaactcaccgaggcgctggccgtgcagattgtaacggtcgaccaggccctgcaaggcagccaccagcaggtcctggttgctgtcgtgggcgtacaccgtgttggagcgggcaaacgggatgcggttgccgccgataatcgccacgcggcgggtcggcggcgggttgaagctgtagtcactcatcgaacgctctcattccaaatgaataggccgcgcatatggggtttgtcgccggcgaagttgcgcacttcgaattcacggcgcgggccggtcacggggtggttccacagcgctacctggccgggcaggaagatcggcagcttgaagtcgcaatgggcctcggcctggtccagcccgccgggtggttgctgggcggcgagcgctcggcccagggtccacatgccatgggcgatggcacggcgaaagccaaagagtttcgcgccgatcacggaggtgtgaatcgggttgaaatcccccgacaccttggcaaaacgccggcccaggtcggcgggtaacacccagcgctgggtgcacaacaaaccctcctcctgcaatggcaacacgtcgtcccatggctggccgaccgggtccttgacgtcccggcgcaggtacaggctgtcgctctcccagaccagagtgtcggcaccgtaggcacgggtggcgatgctcagcgcctggcctttgggatgggcgacccaacgctcggcatacacctccaggcgcaaggcctggcccgggtgcaggcgctggtgctggcgaatgcgattggccaggtgcaccatgccgctggccgggtacgggaagcttgggcgcgtcagcagcatcaggtgcagcgggaacgccagcacatggggataggacaacggcacgccctgctcacggcgaaacccacaggcacggccataggcctcaatgccggcgcccgacaactcggctgccgcacgcaccagacgctctttgggcagcagcggcgcaccgtcgagcgtgggtttgcgcaaggcgcgcacgccatccagcagcaagcgcgtgcgcgatggcggcgggtcgataatctgcgtcacgtagtccatggctcaggcccccagcaggctttgcccgcacacgcgtacaacctggccgttgaccccgccggacgccgggtgtgccagccaggcgatggtctcggccacgtcaatcggctgcccgccctgggacatcgagttcatgcgccgccccgcttcgcggatcatcagcgggattttcgcggtcatctgggtctcgataaacccgggcgccaccgcattcacggtgacctgctgcgccgctgcatggggtgccagcccttgcaccaggccaatcacaccggccttggaggtggcgtaattgctctggccgaggttgccggcgatgccggagatcgacgacacgcacacgatgcgcccaccgggattgagcccctggttgccgagcaacgcctgactgagttgcaacggtgcttcgaggttgaccgccagcacgctgcgccacgctgcttcgggcattttcgcgatggttttgtcacgggtgatcccggcgttgtgcaccaccacatcaaacgcgccgtattgactggtgtgggcctgcaacaacgcggcggcatccggggcggtgatgtccagcggcaacgcggacccgccaacgctggtagcggcttgctgcaaggcttcttgcgcctggggcacgtccacgcacaccacatgcgcaccgtctcgggcaagcacctgggcaatcgccaggccaatgccacgggaggcaccggtgaccagggcgcggcggccggcgaagggtttgtcccagttgacggtgacgtggccgtctaccggttgttccaggcgcaccacttgcccggacacataggccgagcggcgcgacaggaagaaacgcaagctgctgtccagtgcttcttcggcacccggcgccacgtagatcaattgcacggtgatcgcccggcgcagctctttggccaacgagcgcaccagcccttcaagggcgcgctgggcgatggcctggggcaagtcctggcaatgttccggcgcagtgccgagcaccaccacacggccatggtggccgatgcgtttggcgttggcgtggaagaattcatacagctcgtccagctgttgcagatcggccacggcgctggcgtcaaacactgcgccctgcaccttgaccgtggacggcgccttgggcgtggccggggtggcgatcactgtgtcggtggccgcgaacacacgctgcacttcagcggccagacgccctgccccggcaacgatcaccggattgaccaggccatgctggccgctgcgatggcgttgcagcggcagcggttgcggtaaacccacggcctgggccaggcgacggccccagggggaattgacgaacgaaaggtagctgtcactcatagatagatccactcaccacacatacttgccgtgtaaacccggtctgtgtgggagggggcttgcccccgatagcactctatcagtcaacgattcattggctgaaccaccgctatcgggggcaagccccctcccacattgattgggttttttcctaattgactgaggcgttttcactttggctggcgcgacgtttcgtggtcggctccagcgcctgtttgcgctgttgcaatgcttccaacaagccgaagtcctgcggaaagtcgtccacctggataccgtgatcggcgtattccacataacgcccgagcaaggtgtcttcgtcgtcgctgatcaggtccagtgcccgtgccttgacgcgccaggtcgtgaacgccgtggcggagatcggcattggctcgatcaggccctgcttgacggcggacttgagtcgggcctcgatcagctccacttgcggcaacagacggaaacccagttcgccataggccagcttgtcgatttccggacgtgggatgtaggaattggccagcagacggtcgcgggtttcccccggcgtctgcaccacatcggccacctgggccagcaggcggtcggacggcttgcgcaatgggataccgaaggggaacgtcaatgcctttagcacggatgcagcggctttcgacgggtaattgtcgagcacttcggccaacgcttcatgggcacgcagcaacgcatcctgggccgcccagtgcaccagcggcaaatccgcctggggccggccgtcatcctcaaagcgcttgagcacgcaggacaggatgtacagctgcgacagaatatcccccaggcgcccggtgatactttccttgcgcttgagggcaccgcccagcacgcccatggagatatccgagaccaacgccagcaccaccgacagacgattggcctggcggtagtaggacgccagcgcggggtcggtcttggccggcgcagaaatcagccgaccgcctgtcagggaatgcaccactgcgcgtacggtgttggccaatacaaagctcacatggccgaacatggcactgtcgaatgcctccagcgccttgcgccggtccgggttgcgcgccgcttccatctcgcggaacacatagggatggcaacggatcaggccctggccaaagataatcaggcagcgcgtcatgatgttcgcgccttccaccgtaatggcgatggggctttgctgataggcgcgggccaggaagttgttcggccccatgcagatgcctttgccggcgacgatgtccatgccgtcattgacgatgatccgcgcccgttcggtaacgtggtacttggcaatggccgagatcaccgaaggtttctctcccgcatccagggacgctaccgacaccttgcgcaccgcatcgcaggcatacaggtgcccggccatccgcgccaggggcgcttgcacgccttcgaacttgccgatgggcaggccgaattgtttacgcatcgccgcatacgcggtcgtgccgcgcaccgcgaccttgcccaggccgacgttggccgatggcagcgaaatcgcccgtccggctgccaggcattccatcaacatgcgccagccgttgccgacttgttcgcgcccgccgatcacccattccaaggggatgaacacgtccttgccggtggtaggaccgttctggaacacggcgttgagtggccaatgccggcggccgctgttgacgcctgggtgagacgttggaatcagtgcgcaggtgatgccaagggaacccggagcgccgagcaggccgtccggatcttctgcgcgaaacgccaggccgagcaccgtggcgatcgggccgagggtgatgtagcgcttgtcccaggtcacccggaagccgagcacttcctcgccttcatgcatccctttgcaaacgatgcccaggtcgggaatcgccccggcatcggagccggcatacgggctggtcagggcaaagcacgggatgtcttccccccgcgccaggcgcggcaggtagtaattgcgctgggcatcggtgccatagtgcagcagcagttcggccgggcccaaggagttgggcaccatcaccgaaatcgccgccgccgagcagcgcgtcgacagcttcatcaccacctgcgaatgcgcatagtgggagaagcctttgccaccgtactgcttgggaatgatcatgccgaggaacccggcgtccttggtgtattgccagccttcaggagacatgtcctgccacacctgagtggtttcccaatcgttggcgatgtcgcacagggtctccacttcgttgtcgaggaaggcctgctcttcggcgctcaggctggcgggcgcggcttgcagcaggcgctgccaatcgggcttgccgctgaacagctcggcgtcccaccacacggtgccggactcgatcgcggcgcgctcggtgtcggacatagcgggcatgattgtacgaaacaaacccagagccttgctggtgagcaaggtgcggcgcaggggtttgatggtcatcagcactgcgggcaacaccaccagcagcgccgcaacgccaatgccgaaaccggccacagcgttgaacaggtaaccggccgccagccagatcaagccagcgcccagccagtgaatggcagcggcttgtcgatacgccagggcaatcgcagcggcgacacccaccaataaccagataaacatggggatacctctactcgattcagggtatggcaaaagcgcttgcaggtcgcactgacctcaggcgtaaggccacactacaaactcggagaaaaacattcaatttttgttttgaaatttttatttaatgcttggacgaataaacaacggctgaacaggtcagccttacagagtcgcgattgagttgaagcggtacgggtcgcctgcgcgacccatcaacgccaggccagactcaaacggcacgggagatgcgctccctgccgctcgtctatgggccctgcgctcacaatgaatcagaacgcgtaagtcgccgaaaggctgacaacttcacccttcgcgtcggctttgccatcgagagtggccccacccaaacgatcctggttgtgggtcctcagcttggctttctcgacgaattgccgcgagtaagccccatcgatactcaaaccaggaatagcacggatgttgtagccaaacccgagggaagcaaatatacgatcaccgtccggaatacgtgggtcacgtgtggagtttcgtgttggggtctggtcggtggctacaccggcacggaaagtgaagtcgtcggtgaatttatagtcaccgcccagcgaaaccatccaagcgtttttataattgtagggaattgacacaatttgcgcgccgtcagacttcaatgtcagtgccttgaacgacgaccattgagtccaggtaacgctggcgcccaacgtcagacggtcattgaactgatgcacccaatcgacagaggcatttgccggcacatccagttgcgcggaggcattggcgccattggagttgaggttgagccccggatacgcgagtgcaggcaggccaccatcgatcagcgctttgttcgcgtcgtcggcgtaaatgctgtacttaccctctagcttgttttttatcttggcgtggtagttcaaacccagggtgtcgaattcggttggcttccagaccacaccggcaaaccagccaacggaggtgttatccaccttgacccgcatcaaagaagaacccacaccggaagggaacggaattccgatggcaggtgacaacgccgctgctgcatataagtcgatgttctggctgacaaaccctttggtgtgctgaacaattgcaccggcgcccaaagagaactggtcattaaccttgaacgataacgaacccgtgactccgacggtttcaatacgcgtatcgaccgcaaaatcccggccgatccagtcctggtcccaggttgtacgtgcacccatcggcactacctggcttaaaccgaaagcaaaacggtcgttgataggcatcaccatgaagccggtgggcaaccacgcggtaaagccgccttgtccaccatcaccggtgcgtggcgtggagcttaaatcagtggggtctacggcggctggcgcattgcctgcgtaatccttggccgtccccttgtatttgatattaatccgtgcgtaatcgacggtgaactgagaaacgttgtgatcgatgaaagccatggccgccgggttgttgtaagccgcagacgggtcattctggaacaacgatccccccccgaaggctctcccccagccaggagcaccgaaagtcggcgtggaaaacccgccagcctgcgcctgaccggttgcagtcatgaggctgcctagaatcgccagactcaataatgtgcgcgcctgttgttttttattgttcatgccctgttccttattatttttctcatgttcggcgttcaaacctgtcccacgtcagcgggcgccttttgcaaggcgcccgccttaacgtgtgatcatcacgtttacagccagaagcacgttatcaaggggtcacagtgaaggccgggcttggattgacagccagggttttgatgctgcaggcacccacagtttgtgcagccggaatactcagcgtattggtcgcgttgttccaagtgacggcgatgtttgcagtgccacagttcgaaacaatcttgaagctcacaccttccacaaccccagtgaagttgttggtgctacccgccacgggcacgatgtttttcagcgtccaaggcaagttctgcataaccggtacaccacacaacgcgttagagccgctgacgctcgcaccagtgatggcagcagtggtgccatcagccgctaccgtaccggtaaacgtgatgttgcaaggcacggcaattcccagcgaagcaggtgaagccaccgaaatcggaccgcttgcagtgaagccgccagtcggcgcgatagtggccgcgctggccattgaagcggcaccaacgcagagggcgaacgaagttgcacaaacgagggttttcaagcttttcattgtttttcctcacatgttaaggcgaagtcatttcgccaggggtaatggccatgatcgagaggtcacggtgaaactgcagaacttccctttccagccaaatctcaattcaattaccgctgcaacatccgacggttattcaacaactttgaagttcggcggcatcttgatcgacaccgtcttgatcttgcagtcttcgccaatcggcacattggcggcttccaacttgccggtggcgttatcccaagtgccatcggccgttgaaggtccgcactttccgcccaggccaaatgcatgcacatccacgctgatcttcgacatggaaccgctcttggtgtctttggcgactaacacccatggcaagttgatggcttccacgcggctgcacttgaggccgccgtcgaattcaactttgtcgacattcaccgaggagccatcggccgcaactttgccggccactttgatggtgcagtcggcgctgatcagcgcgcccttggagaagctgatggggccttgggcggtaaaggcgctgcccgccggttcgatgcgcgcagcctgggcctggtgatacgcgatcaggcccagcgcggccaatacgatgtgggtggtgaacttggcaggtgattgcatggtgtacgtccttccctttaattatttttgttcgggtcaaaccactgtgttgcaactgattttgtaaaccttgggcgaagttagcctgcgcggcacgcaggccccgagtacgccaacaaccggttagttgaacttaaaacggtttggcgctgttactgtacttctccaggtacttcaaccgttgtgagggctgaagattggtcagggagatatccccggcataatgattcagcacgcgatggtccatgcgccgccgccacaagtacggcacataggcccagacaatcatgctcgcgtagccatagggcagttgcggtgattcatcaaagtggcgcaacgactgataactacgggtcgggttggcatggtgatcagagtgccgttgaagttggaacagaaagatattggtaacaatacggttgctgttccatgaatgccgtggcgagcaacgttcataacgaccattgggcaacttctggcgtttaaggccgtagtgctccacatagttcacgacttccagcaacgagaagccgtagatgccctggataatcaggaacggaatcactgccgcgcccagccaggcgatcatcgcgccccacagcaccacgctgtacatccaggcgctgagcacaccgttctgccagtgccaggccggcaaaccgagtttgcgcaggcgttcgcgctccaggttccacgccgagcgtgcactgaaccacaccgagcgtggcaggaacgcccagaagctctcgcccaaccgcgaactggcggggtcttccggcgtcgcgacacgcacgtgatggccacggttgtgttcggtgtagaagtgcccgtagaaagtcggtgccagggtgaccttggccaggaacacttccagcgcgttgggcttgtgccccagctcatgcgccgtgttgatcgcgatgccggtggcggcgccggtcgacatggccatgcccaggtaagtgaaccagctcggttcgccatgcagttgcgtgcgtgcagtgatgtaactcgcagcgtgagacagccagctggacggctccaggttcgcggcagcctgcaacaggccgccctggatgatccagtcgataccgcccgcggcgagccagccggtgatcaccaccgacgagatcacaaacagcacgccggtgtagacgatccagcgatagtagctttgggattcgaggtggctgacggcggattcgggcgggttgctcacgtcttcaccgagcaagccatcgatcaacgggatcagaccgaagatcaccagtacaccgacccaccagagttgctggataccggtgctgatggccagtgcgccggagagcaacggggtggccaggggcatgatgcccagccaccacaggtgacgtttgccgtcggtccagatgcttggggctgccagggtctgattcatggcagcctccgtggcagggaggcaggaaacaggttcagggagcgctgaaggctccaggaaatcaaccatgcgataaaagacgtttttttcatttttattcgctcttaggcatttcaaaaatcatttcaaaataaacattgaaatatttttttaaagaaatagcgcggaatcgttaggtcgtcaactactttttcgaggccttttttgcgtgaccgtgcagtctctttttcagctgtttggtcaggtctctagggcaagcatttcggacagtcaaacccgcaacgagggccacgattatttgttcgccaaggcaaatggcggatgcaggatcgcggcggtctgtgctggccgcgcccgcttggccaactgctggactgcctcgaccacccgttcggtggcggtgatcggcagcatatgcccgcgcccttccactacttgcagcttcaggcccggcaccttgtcggccagggcctggccgtgcttgcgaaagtccaggaccttgtcccgtgcgccgtagatcaggctgatgggcagcgtcagttgcgggtagcgcttgaccatgtccggcaggtcgtcgttgaccagagcgatctcgctggaggctgcatagaagttgtcaggacgcatgcccagcagcccgccgccacgggtggcgaagtcgtccggggcactgtccggtgcgaacacgcccttgaccaccgagcggcgcgtcaacaggcccatgggaaccgtcaaggtgcgcgacacccagcgcctgagccaggcaggtcgcacagccagtgaccagaacaccagtggcaaggtcggttgagggtgcgtcaggggcgccaccagtatcagcccggacaccgcatggggatggtcgagggccagcgccagggaaatcgccccaccaagggaatgccccagcaccagcggtttatccaggcccagcgtattgataaacgccgccacctgccgtgcctgggctggcaagtccgcaggagtgcctttatgacgggtggaatagcccgaccctggtcggtcgaggctgatcacgcgaaaatgctcgcgcaactggccggacaaggcatacgtcaggttgcgactgctgcccatcagcccgtgaatcatcaccagcggcgggcctttgccttcctcgtaataatgaaagcgctcgccgtccacctccagaaagcgcccgttgatcggaacggcggcttcgatacgccgcgtcatccatgtactgaacccccacaaaacggcgctcgcgcctataaacacagccgcagcgacaacccattcaacagccatagctcggtcctctgcatccctgctgccggcgacctgaccggaattgatcaaggcctcggccatcgtccacaccctggacccgaactgcgtgcctgtccgtcggacaagtggcacatgagagacctgggactagcgtaggcgatattttcaggtagattatttaaaatcttttttaaaataagtaattcaatttttctttgcaatggtgttctatctaaaagacaaaacaagaaaggagcacatccgatgcccacgagggactgcttatgaatgcccagagtgattcaatcgacatcgccatcatcggctccggcttcgccggcctgtgcatggcgatcaagctcaaggaggccgggttcaccgacttctttattgccgaacaggccgacaccctcggcggcacctggcgggacaaccactacccgggctgcgcctgcgatgtgcagtcccatgtgtattcgttttcctttgcacccaacccggcctggacacggcagttcgcgccgcaggcggagatccgtgcgtacctggagcaatgcgccacgcgctttgggttggggccttacctgcgtttcggcatgggcttgcagcgcgcggtgttcgatgagcacctgcaacgctggcaattgaacttcagcgatggccgccaggtcagcgcgcgggtgctggtgtcaggcatgggcggcctgtcgcgcccggcgttaccggatattccgggtctggacagcttcaagggcaagcgcttccactcccagcagtgggaccacgactattccttgaaaggcaaacgcgtagcggtgatcggcaccggcgccagtgccattcagttcgtgccgcagatcgcgccgcaagtggcccatatggacctgtttcagcgcacgccaccgtggatcatgcccaagcccgaccgggcgattacgcctttggagcgctggctgttcaagcacctgcccttcactcagcgcctggtgcgcggtgctttttactgggcgctggaaggccgtgtagtgggctttgccctgcacccacggctgatgaaaatggtgcagaaaatcgccctgcgtcacctgcacaaacaagtggcgcgcccgtctctgcgcaagaccctgaccccggactacaccatcggctgcaagcgcgtactgatttccaacgactactaccccgccttgtcgcgcagcaatgtcgaggtggtcaccgatcacgtgctgcgcatcgaagccgacggtgtgatcaccgccgacggcatcaagcacccggccgattgcctgatcttcggcaccggtttccaggccaccgatcccctgccccgcgactgcatcatcgggcgtggcggtgtggacctgatggacacctggaaagacggcgcccatgcctacaagggcaccacggtgcctggctatcccaacctgttcctgatcgtcggccccaacaccggcctggggcataactcgatgatcctgatgatcgaagcccaggtgacctacatcctcgatgcgctccagcacatgcagcggcagcgcatcgctacggtggacgtcaaagcggccgtggaaagcgcctacaaccaacagctgcaagccaagctcaagcgcaccatctggaataccggtgggtgccagagctggtacctcgacccgcgcaccggcaagaacaccaccctgtggcctggctcgacctggcgcttcaagcaggtcacccgccagtttgcgctgaaggattacgtggccgacctgctgccggtgaacacgcccagccgccccgtgccggcaccccactccaccccggaaggcagtctgtcatgaagtcattcaatggccgcgtagcggcaattaccggcgccgcatccggcatgggccgcgccctggcattggccctggcgcgtgaaggttgccacctggcgctggcggataaaaacagccagggactggaacagaccctggcgctgatcaagacctcgaccctggccccggtgtcggtcactacccaggtgctggacgtgtccgatcgccaggccatggaggactgggccgcacgctgcgcggccgatcacggccaggtcaacctggtgttcaacaatgccggggtggccctgtcaagcacggtggagggcgtggactatgccgacctggaatggatcgtcggtatcaatttttggggcgtggtgcatggcaccaaagcattcctgccgcacctgaaagcctcgggcgacggccatgtgatcaacacgtccagcgtattcggcctgttcgcccagcccggcatgagcggctacaacgccaccaagtttgcggtgcgcggctttaccgaatccctgcgccaggaactggacctgcaacgctgcggcgtgtcagccacctgcgtgcaccccggtggcatccgcaccgacatctgccgcagcagccgtatcgacgcgaacatgacgggtttcctgatccacagcgaacagcaggcccgcgctgacttcgaaaagctgttcatcaccgatgccgaccaggccgccaaggtaatcctgcgtggcgtgcgcaacaacaagcgccgcgtgctcatcggccgcgacgcgtattgcctcgacctgctcgcccgttgcctgccggccgcctatcaggccctggtggtgttcgccagcaagcgcatggcgcccaagccgcgtacgccggtatttgaaaccaatgacgaaccccgtctctgaacaggagcacgcactatgttgccgatccgccgtgacatccatttcgccctgcccgccgagcgcatcaaggactggcatgaacagggcccgttcatcacgcatttcttcaatgccctgtcgctgctgtttccccagggcgagctgtttttcatggacagcgtgcgccactaccgccagcacatcgacgaccctgctcttaaaaaagagatccagggtttcatcggccaggaggccatgcacagccgtgaacacgtggcctacaacgacttgctgcaagccgccgggctgcctgcgcatacactcgaccggcgcctcaaattcatcctcgacctgcagaaaaagcacctgccaccgtccttcaacctggcggtcaccattgcccttgagcactacacggcgatgctggctgaaatcctgttgagcgacccttcacgcttcggcaattcactcaagggctatcagcagatgtggtattggcacgccctggaagaaaccgagcacaaggccgtggccttcgatgtgtggaaccgcgtgatcaaacccggccccaagcgctacctgttgcgcaccggcaccatgctcaccactacggtgttcttctggctggtggtgttcgactttcacctgcgcttgctgattgccgaccgcaagtcgggtgggcacctgaggggtttctggcgcatgttgaagtttttgtatgggcacaaaggtgttttcccacgaatgctggtgccgtggctgcactacttcaaacccggttttcacccctgggaccacgacaatcgggcgcgcctggccgggatcgatggcctggtcgaggagatcgagcaggcccagcgcgggtattaagcctgcgccaaggcggcgcgttcacgtacaaacccttgcaactgatcgcccggcagcgccttgctgaaataccagccctggataatcaattcggcgccggtattcaggaaggccaactgctcggcagtctcgacgccttccaccaccacgcccaggttcagcgcctcacagaagcgcagcatgccggtcatcacctgggcgcccttggggtcgtgctgggccaccacgaagctgcggtcgatcttgatgaagtccaccgggaactggtgcaggtaactcagggccgagaagccagtgccgaagtcgtcgatatacaccttggcaccgatagcctgcagcttctggatggtctggcgcgtgacctggatatcactgaccagcgcgtcttcggtgatctctaccgatacgtgcccatgggcctgggccaggatctccaccaggcgttcgccataggcggcgtcggtcagggtcgcgctggaaatattgatggtcatcggcagggcaaaaccgagtttctgccacttctggtactggcgaactgcctgggacgccacccacacatccacatccggcatcaaccgtgcctgggccagccattgcaggaattcccacggcgaatgcaccgtgccctgggcgtcgcgggcacgcatcagcgcttcacacccggtgcacaggccggtacgggtcgagacctgcggttggaattcgaggtagaactcatagtcgctgatctgctggatgcggctcagctccaaggcctggcgcgccagggtcttgtgggaggcgagtaccgggtccagctcgcgcaggcggcccttttcttcaaggccacggaaggtcatgtccagggacttgaggtacaccgtgcccccttcgctggcctggcgatggatcgcccgcacatacggcgcgtacaccagagtgcccaggcccagcagcgccacttgcagtgccaccgcagccaggtcgccgtgggtactcagataggcattgagcagcaccggcgcggtgaacggcacactgaccaccgccggcgacacccagcccatctgtaccaccgtcaatgccagcatggcattcaacgccgggacgatcagaaacggtatgaacaaacgcgggttgaggatgatcggcaagccgaacagcagcacctcactgacgttgaacagtgacagcggcagactcgccaccgccaacaggcgcatggactggctcttggagaacagcaggatggccagcaacaggcacaatgcaccgcccgagccaccgataaacgcaaagctgcccaacaggccactgttcaacacatatttgagcggctcacccgccgcctgggccgtgctgttcagcaccacggcctggtccagcacatcgaacagcggttgcatcgcgtacacaccgtgtatgccgaaaaaccacagcagcgaattcatcagcgtcacgaacagaccgctgccgtagggcgattccagcgcgtcgaggacctgggggccttgtaactgcgccacatacggaatctgcagcaacaaggacagcaccaccaccagtgccagggcggtgatagcgcctggcagcaccatattaatggtgccccgcaggttgtgccccaccaggtcttcgttgaccagacgggtccagcggtagcggtgcagccaggcaatggcaggaacattcaacagtggcgaggcaatggcgataaacagcacaaaggtggccgaggcccggggataatcgcgcagaataaatgttgccaccaccacatgggccaggcacaggaatgccacgggcaattgcggcaggcgatgctggatcgccagcatgtaaccgatggacgcggccaccagcaacgggatcacggaactgatctggttgtgcaggccggcgaggaacgccaccacctgggggtcaaagccaaggacgcgagcacattccgacagaatcagaaagcccgccgagaccagcaggcaaggcaggatccacaacaacccttcgcggatcgcccgcagcgattcagtgctggccaacgcggccaggcgttgggtgaagaaaagcttgaacagcgtttgcgccatgacccatccctctgcccatcgcccactgtccctgcagggcagggctggaagcaccggctaacgctacacgtcctggcccaatcagcgaaagccttttgccattcatctgggtgaattttccgtatcggataacaggccaatcgccgaatctgcttcaatgaagcctatccgcctccccctgacctgtgtttggagtaagcctttgtcacaacccggtgataaccaccagcgcgcgctggacaaattccttgaagaacaccccgaagtcgccgccgaactggataccctgaatccgctggctgcgcaggccaggggcgaaaccctggtccagtaccgcgccgaacgcttgcatgaagcctttgaagcgcaagctgaacgccagggcctgtttgcctgggagctaaccctcaaactgaccgccgactcctgcgaggcctttgaagcccagcgcctcgaagtgcacaaggaggtggcgcagatggctggcctgagctgggtcgagtactgccaactgcacgacctgccccgctaacgcactaccccaggaaccagagacggcgcctgccccccagcacttcgcgcaactcggcgaccgacaccgttcgttgttcaggatccatcgccagtgccgaacacacagcgggccagcaatgcctgggcagttgcctcggcctcggcagcggctgatgctgctgacgttcgccggggcgcctcccttcggccagttcatagagcacgctggcaaccccgtataaatccgcacgggctgacggaagcccgccggccatcagctccggtgccgcatacgcaggggtccaggcattcaggcgactgcggctcaagccgggcaatcctgcccttgcctgcgcttcagcatggcccaggccaaaatcgaacaagcgtaccccctgctcccccaccatgatgttcgccggtttcacatcgccatgcaggaccccttgtcgatgggtgtacgccagtgcatccagaagttgcacggcgatgggttgcaacgctggccacgccaacccttgcgggcattccgggagcaggcggtccagggtcaggccgggcatcacttccatggtgaagaatgccaactggtgcgctgtgtcgacctcgaaagaaaaggcccggaccacgtgttcatggcgcaggcttcgggtcagggcgaactcgctgtacagcaacacgtgggcgtcggtggacgcacagagcgtctctcccaacagcttcagcgccacgcgcgcgtccggttcgccaaacgcctcatgtagcagatcccgggcacgatagaccacccccatgccccctgaaccgagcattcgctccagctggtagcgccccgcaagcaggttcggcgggccgacagcggcgttcatggctgcaccaccaccgcagtgaggtcatcctgtgcgggcccacgtagcacgtcgctgaacaaccgctccaccacctgccctggcgtgccggcattcatcgcgcgccccagttcccggtggctgagcccttggtacaggccatcactgcacagcaagaacacatcgcctgggtggggacgcagttccagtatctccagactcagcggttttcccgcgccaatggcacgagtcaaggcgcgggcgtctggatgagcgcgggccagttccaggctcaaatgctgcttgtccatcagttgctgttgcagggagtggtccctggacagctgatacaaacgctgccctcgccagagataacatcggctgtcccctgcccagatgcacgccgcgcggtcacgctcaagcaacagcacaaccaccgtactgcccatgatgcctgaggggccatcggccgcctgcaactggctgtcgagcccgcgcaggcagcgttggacggcctcgacccgttggtcgaagctgccttgccctggcagcgccgccagactgctgattaccctttgactggccacattcccagcatgatgcccacccattccatcggcgaccgcccagcaaccgcgttgcgggcaatcgaggaacccatcctcgttacgcgcacgacgcttgccttgcgccgtacggccggcacttcgccaagggtgcgcgcggttcacaattgctccggcaggcgaaagccgcgccatgtagccatctggaacgggctggggctgcgttggctggtgagcaggtagttggcacgcaggccggccaggtcggccttgagtatctgtgcatccctgccgctggccggctcgttttgcatcaattcgaaaagccggaacaacgaccaggccccctggtctttttcaatgcccagcggtcgctccgtaccgcgctccagtaccaggctgctgcgcccattgtccgcatcaatcggccaatggaacgccatcggcacgatggggccgtgacggtattccaattgctgatcgcccacccgcagcgtcgcccggttgacggcctggtccaggctgtagggcgccagcgtgaacagaacggtccaatccccctggtctgcgctgaagaacccttggcgaatcacctgcgcccgggtcagttggtcgagcaacgagcgtgaaacaggcaggctgcggccctcaaggccccgcaaacgatagcggctcccctcgacactgacgaacggccgcaggtagctgtcatagaagtgctccatcaccccccgtggtttaaagaacgactggaaatcacccagggcaacatcgctgccggcatcggcattgaaggggtagcggtgccggatcgccttcacataaaaaccatacacctcactgtgataacgctggttcacatacccataggcgtcatccagcagatggcgccaggtttgctcggcaatcccgtccaaccagcccttgagcggctgcggcaggcgagcagcagcgtcacgcaggttgcccagcagcggctgctgtccatccatgcgttgcctggccatcttgaatgcggcctgctcgggcgaactgtcacggttcagtgtcgagacttgcaggtgcagctcatccagcaagcgcaaggcctgggtcagctcggcggtcgggttctgctcttcatccagcaataggtgcaaaggctcgaaacgacgcagtaaagcgcgccgggcagtatccggcagcgtttggcgcggcaaggctcgggtgagcaagccggacaccggcgcgcccaactcagcgacctgctggctcaccgcttcaagccgctcatgggtcggcagcaatcgcgtgtgttcacgcacctgccgcaacagcaacaccagcgccgactgggcggaagtgaagttcgcgagctgctgcgcatcgtgcctcaggtcgtcgctttccagtagcctgactcgacccagcgcatcactccagatgtcggcgtactcgctgaagtaacgctgttccagctccagcatcagcttgcgcaagtccacgacgctgaggtctgcggcctcgccaagcacccagttatcctgggcgatggcattgaccaactgtggcccctggctttcgaaaaactgcaggtatttacgcgtatagaaacccgggatgggcggctcaaccctggaaaacgcggggttttcagcgaggcgcaagggttccaggtgccgcgcttgctcgcgcagtgtccggtagaccacctctgccattggctcaccgcgcagcaccaggcgggcatgggcgaccaactcatcattcagcggggccaaaaaaccctgttcaacgagccgtgcaacatgttcgttcaggcgtttgtgtgtcgatgcatcctcgatgtacccaacagtccgcagccccgccacttgctcggccaaccaggccttatcacgtcgctcgggcagattgagcatcaggtaagcgcgcaggctgtcgagcaactgctcgcgatcacccaggctgtcacgtacctgttgttcgagccgtagggtcacgtagggcagcaattgctgatgcagggcttgttcgtaggcgctgctcaataacggccgactcatctcgccctgatacaagccgccccgctcaacccaaggtactttggccgccggtggaaacacccctgtggccgccaggcgactgtccaacagtgcgagcaacgccaggctggcgtccgcttcgggttggcctacggacttggggttgatcagctcccgcagttgcaccagccgctgatggttgaacgcgtaactgtgcgcccacagcgccccggcagcacccacaaccaatgaggcggccagcgccatcaacccgtggcgtcgacggatgcgctgccgctccggggcacgcaacccggcaagaccggcctcggcaaaaatcacccgattgaacaggccctgggcaaaatgggcacgcacatcatctgtcttcgcgcaggtcaggtagaacccgcgcaagccgttgattcgctggtagcgatgggcggcaaacgcactctcgataaacaggcagacaaactcgcccaggcgcgcaagatgctgaggaaaacccagcatgcggcctcggcgctcaaggttgcgttcctgatgcaagcgcgggatcagctcggccgccacgcgttgcaacaaggcgtcgaatgtttcgcgtacctcggcgacttccatgcctgccgcagccgccaccaggcgctcacccagccagtcttctgtggcgtcgccctgccgcgcatcaaagaactcggcaaacccggccaaccgatcaagctgggtcagcaccagatacaccggcacatccacctgcagtgactgctgaatgtcctgcaagcggttacgcacatggcgcgcgtgacgctccaggtcgtgttcgttgctgcgcaacagcgtaccgacggacagcgtcaccaccacgccatcgagcggccgtgccctgcgccatgacttgagcatgtccagcattgtcgaccatcctgctgcatcgacactttggtcgggttggctcaggtatcgacctgccatctcgaccaccaccgcatcgtctgcaaaataccagtcacagtacgaggtggcgcctggctgcatcgggtgcgtccggtcgagcgccgtcggcaacccggcagcggccagcaagtcggtcttgccgctgccctgctcgccgatcaacaggtaccagggcaattcctggcgcgaacgctcactgcgctcgccgtagcgctgcgcggttttcaacgtctgcagcgcttccttgaagcgcccccgcacctgcgccacttcgtcattgatcaacccctgctgctgaagatgttcacgctgcccaggctgatccaaacgcgcggagcgacgtgctcccaccaccaccatcgccaatccccataacagcagcattgcgctgatggtcaacaaccgggccgtcgaaccctgccagaaacggtagtcgtctaccgccagcaacggcccgacgaaccacaccagcagcgcgccggccagcaccagcaacaggctccatgcccaactctcgcgcagcaccctgcccacgcgtttgaagaatgcgttcattcattgctcccagcgttacaagggcgtccgagacggctctgccagcgaagattggaaagcatgcaacgtcgccctgcgctcctgccccagcatccaggcgaaccccgaatacaccaccagcagacacgccagcacgcagactgcggcccaggcagcagagacaatgcgtatccgtgcccgagcggtcccgtcggcgtctgctacaggggttaacggcggctgatcgccgcgcacatgcctgatctggcgatacaccgcgtcgtgtacggtttcgagctgcgccctcccccgctccatgacgcggtattggccttcgaaccccaaggacaggcacaggtacatcaactccagcagggccacatgcttgacggggtcgcgggacaagcgctcgagcagttggaaaaacttttcaccgccaaaggtttcgttatggaagcggctaagcaggctggtcttcgaccagtcgctacggccaccccacggcgtagtgaccacggcttcatcaatgacactgcacagcacgtaacgcgccgacatcacctggctgttctcggcgcccagatacaaggcataggcctcgaacgcattgatgcctgaggaaaactgctcattgagtgcctgctggctttcgcgaccggggttggccttgagctggaccacttgcagcaagagttcccaagccgcggtcaacagcacattggggccactcttgaagtgccgtgtaccttgcagctgggcgcaatagatcatgcggtcttccagttgctcgaagcgtggcggcgacggaaagtccgtaacggctgcgtgcgccgggccgagaccctcacggtcaagcaacacggttttttcgtcttgcgggtattcactgtccatagtcatgacgtcagttcctgatagcccagaagttgagttccagctcggcaaactcgccgctggcgtggaaggcgaaaccacctgattgctccagctgtgcaatgtcacgggggctgagttcgagcatgaaataggtcttgccggcgtggaacggaatctgccgcggcgctaccggcaacggcttgaccttgatcccggccaggtgcaggttgaccagttcgcggatgcgctccaccggtccgatcttgagatgggccggcagtcgatgacgcagctcctcggtatcgcactgggcagtggccgccaggatgaaggtggccgtaccgagtaacttgaggtcgctcaccgggcagaccagcaccccgtactgacggggttgcagcgtcaactcgaccgcctgctgttccaacaccagcgacagcaccgtacgaaggccttccatcaacccgcgaaagctcgcgccctgatcgccatgccggtattgcaccggaaattgcgcacgtttgttgtcgttggaaaacgtgcacagctcaccgaaaatcgacagcaactcccgatacaccacctccgggcgcacctgggtctggctcaggtagtgacgcaatctcaactccgcacgattgatcaactgcagcatcaaaaagtcgccgacctgtgcgctggcggaagcgccgtttccctggatgcgagctgcaatcgcatcgccacgggtcgccagcaggctggtgatttcgttgatgcaagacgccacataccccgagccctggaggtagataaacgtcggtacaaaatccgcatccagcctcacaccaccgtcctgggtcgaatccaccacccgggcaacctggagtttcacgtagaaagggtcaccgggcggctcgcccagcatcaggcgcaagtccgggcgcgcgcatttgatctggcaacgggagtcgaccccggcagcggagtcaccgatctctgcatcacaggcgacatagcgcgccaggacatcgctttgctccttcgagcgcacctcgatctgattgtcagtcaccagcggcagcgccaggtacacagcctgcctgcctggattggcaggcacctgcaacatcaggggttccagggtgccgctcagctcgaacaggctgccgtccggtaacactccgctggcctggttcaccacaatcttgcccaggttgaggtactgcacatcgacttccaggctcaggaaaccccaggcatcactgttcaacagccgggtatggttgagttgccgatggtagtagcggtcgctgtgctgcaagtgttggggcctcagcagcatgccctcttgccagataacgttgtggatctgcatctcagtcctccgtcctgtcaggttgagttgctgccatccggatacccgtctggtccagcacgatgtcggcacgggtcaactgtccgggagccaaaggcagcacccatcgccattgcacatggggcaagtcacgataggccgccagcacgccgacatagcgactgcgcggctcgacactcagcttgagcgccagccgttcgccggggcgcagttccagctcctcgccgctgacccaatccttgggcagtgcctgctcggcccggccgtagaggctgaagaaatcagcgttttcaaaggccaccggatgccgcagttccagcaattgcaccaccacgggcgaggggcggccgtgaaggtcggggttgacctcgtcgctggccgtcaatgtcaggtccagcttggtgagggtggaaaaaggtgaaaagttgctgcatcccgccagcaaccccagcactagcagcgttgataagacagcgacccgagaccggccaatcatcctgcgtaccccgcgtgaagcgtggagaccaggcgtacctgttcctcataggccttgcaaaagtcatgacgcagcatctgctcatccaagggttcctcgtcagtcagtcgcctgtaatggcgttggtaggcccgccaatgggcgccatcgctgaagaacctgggtgcattgccgtcacgttcaaagcgcagcagcaggcgcccaggcgcaaaggctgccactgcaccgcgtacggcagcccgacaggccacgaccagagccagttgatgaacctgcaagtctcggtacgcctggtcgaccgcttgctcggcagagaactgatcggactcaccgtcgccgagcaaaaaagccagggcggcatggctgtcggcgcagtttttcaacggattgcgggtattgagcagcggaaccgccaataagccgtggacctcgctgttgagttcatcacgggttcgcaggctttgctgcaacccttcgagggtttgcctgagcaggcccgccaccttgatcgccagggcttcgcgccccggcgtatcaagcgagtccacctgcatacccaatgcgtgggcgaactgcgcccagaatgcttgcgaggttgccggtggtggcgtgacaggaccaggtgatacaacgtccctggccggctcagcccattgcggcacgaacaggtgatcgtgctccaccgtgccctgacgtaacgcttcgaccgctgcctgcggcgtggtgtccaacgcgtccagctctgctgaggaattgccgagccgtgcctcgcgatccaatgcgtcgacaggatccagccccaggaacgcgtcgtctggaatcgtgtgttgccgagcaacaaccggccctgcctgcaacaccaggcgggcacggatatccagcagcccaagttggtacacatcgccgtcactgatgagccgtgcctgtcctttgcacaggcgctccatactgcccgacacaccgataccgttgctgctgatatccgtcaggaaatagcggccctctctaaaactgaccagggcgtggtgactggaaatcagacggttggcatccgggagcacccagtcacaactcgacttacgtccgatcacgccaccgacaccgtcaaacgtcttgcgctcaggtggctccccgcttgcggtgctacagagttcaaacatcaattgcatgacagcggccccctgttcagtgcccacgacgagtcgcatgggggtcacccaacggacggtagtcggcatcatcaaagacataattggcgttacagccactcaacaaactcagcgcaagcaccagggcttgccacggatgaaaaggcatcaggtatctcccatgaaaataagcggcccgcacgttccctgctcaaccctcctcgcgggcgtcccccacggggattttcaagcgcgccaggcggtaaagcagcgtgcgccgcgcaacgcccaactcacgggcggtacgggtgcgattgccacggttcttgtgcaggcaatcgatcaggaacacccgctctacccgctccaggcgttggcgcaacgtcgcatcgactgccccagtggcagccggcaccggcaaggacaggtgtgccggcaggatcacgccgtcgtcacagagcagcaccgcacgttccaccaggcatttgagttcgcggacattgccggggaaggcgtgacccgagagttgatcaagggctgcattcgaccattccaccggcacacgcccaagggcggcagaggcttgatgcgcgaattcccgcgccaacagcaacacatcgccgtcgcgctcacgcagaggcggcagttcgatgggaaactgtgcgagcctgtagtaaaggtcctcgcgaaagccgccttgggcgaccattgcggcgaggtcacgatgggttgcggcgatgatgcgtacatccaccttgtgggccgtactggcgcccaacggacgcacttcgccctcctgcaagacccgcagcaatttagcctgcagcgacagcggcatatcaccgatttcgtcgaggagcagcgtgccgccgtcagcgctgtcaaacagcccggtgtggttacgctcagccccagtgaaagcacctttgcgataaccgaacagctcactttccagcagcccttcgggaaacgccgcacagttttgcaccacaaaggctttgctcctgcgcggccccgcagaatggatcgcccgcgccacgacctccttgcctgtaccggtctcgccacgcagcaacacggtgtagggcgtatgcagcaccttgccgatcagacgatacgtctcgtccatagccgtactgctgccgatcaacccgtacgctgaacgcggcgccggcaggcaagcctggggttgggcaacacgtgccgtggcacactgacaccgcagtaaagcgcgctgcatcaaggcaaggctgcccagttggctcaaggcggcggtgtaggcctgcaggtttttccgatgctggctggcacacagcaacacacccttgatgcccttgcctcggtcaaacaacggcacacatgccaacgcttgccagggggtcgccatgaccggcaggaaaccgtactcgtacacgctgcctgagtgtgcttccaggctgagcgcggtttgctggttcagcacatagtgcagcacctgttcatgctggaaatccttggtacaggccggatcgccagggcaaggcatgccgtgcaaatgctgggcgatcagttcaagccggccagtggattcgttgcgccagtaccattggctgaggtcacactcgctcagttgcgccgctgcggcgacacacaaaccggggagagtggctgcgtcgtccgcgctgcccaggcggatgaacccgtcaagcagcgcatcggaacaggccgccgaacggggcagcagagtgagcagccgatcctccctcattggctgaactcacaggttggaacaccgttagccgccaaccgcgcatggacctgtgacacaggttcacctcgggccatggcttgcaatcgtcgatcgaccacctgcggcaacaaatgcagctcgatccattgatcgatataacgcgcaccactgtcatcgtgggcgcaccgctcggccatgtgctcaaccagctccggcgtgtagctgaatgccaggctgcgcagactcaagcgttgtcccaggcgttcgagcttgagccttgccaagtcatgcaggacgtcatccgtgaccgggtaatacggcacgacacgcatcctggccaataacgcggctttgaagtggtcccgcaattgcggcaggatcgcctcatgcagcgtttgcacgtcaggtcgccggccgcctgcgcacaattgcccgatgcgctcactgcccaggttggacgtcatcaggatcagcgtgttgcgaaagtcgatttcccggccttccccatcattggccaggcccttgtcgaaaatctggtagaacaggttcaacacttccgggtcggccttctcgacctcatcgagcaacaccaccgaatacgggcgttggcgcacggcttccgtcaacacgccgccctcgccaaaaccgacataaccgggcggtgcgccaatcaaccgggacagggaatgtttttcctggaactccgacatgttaagggtggtgacgaagcgctcaccgccatacagcaggtcgccaagggccagcgccgtctcagtcttacccacgccactggggccgaccagcaggaatacgccgaccggcgcgtcagccttgttgagcccggcagcaaccgcacgcagattgcggtccagggcctgcaccgcttgctcctggccgagaatgcgcaggcgcaacgcatcggcaaaacccagcacccggtcactgtgctcaagtgccagttgttcaaacgggatccccgtccaggcactgatgacctgagccaccaggcgggggcacacctgctgcgtggtttgctgctgttcaagccagcgttgctcatggtccaggcgctcaccgtccagcgtctccatacgctggtccaacgcgtgcaaggtctgttcgtccacgggaaaaccttcgtcccggtctctgctcaatgcctgaagctgccgcgcgccttccgcctgttctgcataaaggtgttgcaacgcctcaggcgcggtctcgcggcgagtgcgcaaacgagcgcaggcggtatccagtacatctaccgccttgtcgggcaactgacgcccggccaggtaacgggcgctcatctgcgccgccgcgaccaccgcatcgtcccgcacgtaaacgccatgactgcgctcatacaccgggactagtccgcgcaggatcgagatcgcttgctcgacgctgggctcaccgacccgcacaggctggaaacgtcgcgccaatgccgggtctttttcgaagtatttcttgtattccgtccaggtcgtcgcagcgatggtgcgcaactcgccgcgggccagcgccggcttgagcagattggcggcatcggacgcacccgcctgcccacccgctcccaccagcgtgtgcgcttcatcgataaacaggatcatcggtttcaccgcggcgttgacctcatcgatcacacccttcaggcgtcgctcgaactcgcccttgatactggcaccggcctggagcaggcccatatccaaggtcagtacccgcacctctttgagagactcgggcacctgtgcagtggccacccgcagcgcgaggccttcgacaacggctgtcttgcccactccggcttcgccgaccaggattgggttgttcttgcgtcgacgcatgagtatgtcgatcaactggccgatctcaacgtcacgacataacaccgggtcaatacgcccttcatgggcctggcgtgtcaggtcgtgagtgaagcgctccagcagtgattcgccctggggcgcggggtgtgtacgagacgcctgactcaacacgaacgcctgcacacgctgtggatccagccggctcagaaaaacctgataggcgctgcccgcgtgctgcagcggatgacgcaagagcgccagcaacagggcgccgtgatcgacctcaatgtgtcgcagttccaaatgagcaaccatcgaagcctgttgcagccattgcaccagtgcctgggcaaacaccggattgcgtgacgcactcgcctcccccttggtttgcagcgtggcttgcagttctgcggtttcaatatcggcatccttcagcgcccgcaccagcaggccatcgtgatgttccagcagggtcaacagcaggtcttccaccagcacttcccggccgccgcgcatgacgcagcgctcggcggaacgctccaggtctcggcgggcctggggggtcaatgcctggataagttgttgcaggtccacattcatcatcctgattcatccctaataagcgttgccaggcacaatgaccacaccgtcggcgcactcatgcgccagccaactggtccagccgaggcggcagacgttgtgttcaccgatgtgcaaaggccggatctcttccttggccatgaccaggcgcacgtcatagtccaaagggtcccgcgccgtcaggcgcaccaacgaacacagcagcggatagtccgcgccggtcggcaaaaaaccatggaatcggtcccaccccagcccctgcagatgcaccctgaacttgccgttgcgatcagccacccggctgcccagcacctggtcatggccaagggtgctgttcgcggcgccaagccgatttcgctgcgactcggcgatgaccacgctgcgcaggacccactgctcgacgaacaaacgacgatgcttgaagtagtaacgcagcaccgcctcgatcaaggccgccgaatgcacccgcaggctgagcaaccccaggtagggcaacagtcgcttgccattcagttgcgtggcgctgcggacctgcggcccccttaacccgatcaacgcaaacatctgctcggagaaggcatcaccggcgcttgcctggaaacacgcccgatagcgatatttgcgccagatcggcaacatcagccgttgcagacggtggtggaacacgtcaaggaagtcccgggttgcattgccacccaattcgtcggtgcacgcctgctcaccgtaaaacgccggcaatggcgagcccgcaccacacaggcccagcacgttaagacgcaaacgcgcacgcaactggccgtgctcgataaaaaacaccacccggtcgatatcgtgaccaggaaaacccaggcccgggttggcctggaactccagcaagtcgtacagcgtgtcgtcatccagcaacggatgggcatcgcgcagacgctggatgacccgcaggaccgcctgaaacagcgagtactcgcggataacccgggtcagttgtgtcaaagcgggggctgctggcccatccgtggtggccataggtacacgtctccttgtgtgctgatgactcttagttcgtggtaagcgttgaggctggcgtacagcgcgaagaactcgttgagcaccgaggcgaacacaaacacttcgccctcccccaggaagccctggggatcgatgctcaagtcgatgcgtaacccgcgaatcggcaagccgtggagcaattggtcgaccgctgtgtggctgaccgagcgcatcgcgcctaatcgtctctcgctgaccttctgcgcctggcgatcgtgatagcgtggtagatcgtaggtttcgaggatcactttcaaggcatggatgtcagtcagtgacaggtagttgagcgacatgttgctgatcagccgccagagaaagtcccggtccagaggtggagtaaaactggctgtcggtgcgcagatattccggaacgacagcccttgcggcgtctgctcgcaagcctggttgatagcgccgacctgcaattgtcgaggcaggttgtgattggtgcacgtcagctcgatcgacagtgtttgctggtccaactccagaccgctgcccaacccgagccaggtatccagcccggtatgctgcgccgatggccgctggcgaatgctgtaactcgccggcccctgggaacgcgcggtatacccctcatgctcgaaggattcaaagggcacgtaggcctgatatcccagccctccgggatgccaacccgtgacgctgtctacggaaaatacactggcgttcccgcgtgagtactcaccagggatcagcaggtattcgtcctgttttccgtccaggcggatgggtaccgcgtcatgcttgaacaggttgacgatgggggtgcagtacagcttcacgttatccaggctgggctgtctgggttctcgccatggcctgcccaatcggaagcgcaacaccacgccgcacacctgcttgagcagttcgccaggtaatctttgcagtgcccccaacccgcccacatcgacaaacaggtacttgtcgggaaaggcaaaatactcctgcagatggcgatagccgccaaacgtattcggcggatacggaatcagcgcctgctcctcgctgaaccctaccggctgaacctgatcggcgcccagaaacagcgatatcacttgcccatccaccccgtgaatcggcatgccatcccgaccgaaaggcagcaactcgataccctccagatgacgcaacagactcaggtacaacgcctggctgatgtagcgatcccccgccagatgcagacgtaactgatcgaagtgccactcactgaagttgccttctgcactcatctccaggcgcaggctcaaacttccccgttcagcctgggcgctgtagtccagcgcactcagctgcaacggcaaaacctgagtggcgtaacaggtacgaaagcggcatcgttcgtcattgactgcggcactttcaaccggcgtatcgcgcgcgacccacacaccagggcctgagtgtttcagcggatcaaactgcaggatgctgaaggcaggcagcgggcgcatgtagttgggccagagcaactgcatcagcgaatgcgtcagctctggaagctcgtcatccaatttctggcgcaagcgcccggtgagaaacgcaaagccctccagtaaccgctctacgtccgggtcctgaccggcttccgcaagaaacggagcaagcgccggattgcgctcggagaagcgtcgaccgagctgtcgcagcgcactgagttcgctctggtagtaacggttaaaggtcatcaggcatgacctctacccgaccggaatcagagagccgcgcggtaaacaccaccggttgagcgacacccttgaccaccagggtggcttcgatagcgaaggcaagtgccagcgggtcatgatcccgtggcaacgtcatcacttttacctgcttcaagcgcggctcgtaagctcggataaatcgctcgatcaacagacgtgactgactcagcgattcatgcaggctctgattcatatcattgaggtcgggcataccgtagtccggcagtgtctgaacgctgccggcacggatactgagcattttccccagatggtgcgcgacagatgtcacgctactggcgggggttgccgccggacgctcaaggcgctcgaacaggcttcgataaccgcgcacttcctggtccttgctcattctttgtcgagcttgccgacgagggatagcgtgaaatcagcgcccatgtacttgaaatgcggtcgcacactcaggttgacgcgataccagccgggctcaccctcgacatcactgacgacgatgcgtgccgcccgcaagggccgtcgcccacgcacttcggcgctggggttttcctggtcggcgacgtactggcgaatccatttattgagttccagctccaggtcagtgcgctccttccatgaacccaattgctcacgctgaaggaccttgaggtaatgggccaggcgattgaccaccatcatgtacggcaactgggtacccaggcgataattcaactcggcttccttgccctcggggctgagcccgaagtgtttcggcttttgcaccgagctggcggaaaaaaacgccgcattgtcactgcccttgcgcatcgtcaaggcgatgaagccttcttgcgccagttcgtattcacgacggtcggacaccaacacttcggtggggatcttggtttcgatttcccccatgctctggaagtgatgcaacggcaagtcttccaccgctccaccactttgcgggccaatgatgttcgggcaccagcggaaccgcgcgaaactgtcagtcaggcgcgtggcgaaggcgtaggccgtgttgccccacaggtagtgctcgtggctgttgaccacgttttcctgataggcgaaggtcttgactggacactcaagcggatcatatggcgtacgcagcaggaatcgcggcacggtcaagccgatgtagcgcgcatcttcgctttggcgaaagctttgccatttggcaaattgcgggccttcgaaatggtccttcaggtccttgaggtcgggtaaaccggtgaaactttccaagccgaaaaacgccgggccggcagctgcgataaatggtgcatgggccatgcaggccacactggaggcgtactgcatcagctttacatcgggggcgctgggagacaggaagtagttggcgataatcgcgcccaccggctggccaccaaactgcccgtactccgcactgtagatgtgtttgtacaacccggactgggtcacttccggcgaatcttcaaaatcttccagcaggtcttgcctggagacgttcaggagttcgatcttgatgttctcgcgaaagttggtgcgatcgaccagcagttgcaagcccttccaggacgcttccagcgcctggaagtcgggatggtgcagtatctcgtccatctgcaggctgagcttggtgtcgatctcggcgatcatccggtcgaccaggcgtttcttgacgggctcgccacggttctggggcttgatcaactcttcgatgaacgccgagacaccgcgcttggcaatgtcataggcgtcgtcgtcggcgctcagtaatgtctgggcaacgatgttatcgaggatgctgtactgatcagaaggtcgtgccggcagcgaatgctgttgtgtcgtcatggggtcagtgtccttttactgaaaaatgtcaggcgtcggggctgtccagcccaagttccgccagtacccgtgcgcgggactcatcgtcggccagggtttgttcgatcgccttgcgaaagctcggggtgttgcccaacggccccttcaacgccatgagtgcctcacgcagcgccatcagcttgtgtaactcgggcacctgttccaccaggttcgccgggttgaaatccttcatggcattgatgcgtacctgaatggccaactcgtcaacgccagcctcttcctgcaaacggttgggcacgctcaacgtcaagctcaatgcctgcttggccaacacgtcatccagggtgttcttgtcgatagcgatgggcttgcgatcttcaagcttgcgcgcgtcctcacgctgggtgaaatcgcccagtaccaacagcttcaatgggagctcgacttcttcctgcgccccgccgattgcgggtttgaacgtgatattgatacgttccttgggggctaccgaaccttctttggccatggtgtctctcctttttcaagtggctcgaaagcctattcaagtaccgcttccagatcgaagaggcacagcctgcgatgggtgtcttccttgcgttcgcgcacggcatggttttgtggcagcaggtcgcagcagcggtgcaggagctgcgtcacttccagggccagctctggctcccagcgctccaggcccgtgcgttgcagttcgtggtcaagctgttcgagctggatcttcgccagctcatgcttgcccgcctgtatgcacagacgcgcttgggcgagccgccaatgaaaacgtgcgcgatcactgcgcgcagcctgcatgccttgcttgagctctcggatggcagacttgagcccgtcctggcgcagccgctgtgtcaccgtctgcaaggcgatcgcccagggctcggcttgggcatcaatgagtgctgcgggcaattcaggcctgtgcaggtgatgggcaacccgctgggagatccagtcgcgagtggctgcgtcggcaaagggtgcgccgtcgtgaaaacgaaacgcaggcaggtccggcaagcgttgcagcaacagcgcgaaggtcacttccagctcggtcatggccaggtcggcctgcaggacctccaggcattcccagagcatgcgcagaccatcgaaccagaacatcgccccggcaagactggcctcaagctcaagcaccaggtctgcgtgatggccttgtgcaaagcgctcctgataacgcttgagcttgtcgggagccggcccgcgcaatgcggtcacctgctcgttatcggcattcgggtagctggcgagtgccagccatgccagtgtccggctcaaacgcaacgcgcgcaggtcggtggcgttctggcgcagccaccaggcacagagtgggcgggcctgctcctgcaaggtacggagcaccttgtgcgcgtccttttcgctctccaccgctgcttcgggcttgcgcagttggctggcggcctgcttgacttgctcgataaccccgctcaaccccgccaccggggtatcgtcctgcgctgcccgctccaatcgctgcgccaattgcctgcgaaccggcaacagcagcggcgcatcatcccccaggtgctcggcccaaagctcgtccagacgcaccaggtgctcaagcacggcgcggaacaaaggctgctggttctgcagcgccaggccctgcgtgaacagcggctcaaggcgcaataccagccatccgaatgcggcaccgcgggtgcgcggtttttccgggtagagcaccgaccactgatgctcacagaggtagcgcaacatcccgagccccgccagcagccccgggtaggattcacgctggtgcaacgcccaggtcaaccacacagccacccgcagatccttggactggtggcgtagcaggttctcgctggtttccagcaccttgtgccagtcgggctggctgccggcatgaatcgattgtgccttggccagctcggactccagcacttcatattcactcgaaaagcgcatgtcgctaccggcaaaacttgtttgcagacagggtgatcgtgcaacttctagataataatcataccggctatccgaataaatcattttccaccatgcacaactaaaaaaccaaacaaaccaactaaccacgcaagtaatgcgtgacagtgggctatcttgagttcgcattttcctgcgaagccctcgaaccttagtcatgcccaaaacattcagcaagcgatggaattacacttagtccttttcctacaaacccagctaccaccgggaatgcgcaggattttgcgcacctaaccctgcatagtcattcaactaatcatccaacttcagcatttatcgacatttcaagatgagcaactaaatgcgcacccatgcgcaatcaaatacacgtaattaagcccagtagcagcctatcgcgctgaatatccgacctactacaacagcatcaccctgattccattggcgcctgcactttcaggcacgcttcttgttataggcatttgcccagccgaaaacttatcggttggaactacctcatcaatcagacaaggaaccccgtcatgccaacacccgcgtatctctctattaccggtgtaaaacaaggtttgatcacggcaggcacgtttacccaggactcggtaggtaacatttaccaggaaggccatgaggaccagattctggtccaggcgttttctcatcaggtgatcattccccgcgacccacagtcgggccagccaaccggccagcgggtgcataaacccctgatgatcagcaaagtgttcgataagtcctcgcccctgctcttcagcgctttgaccagcggcgaagaggtcaagtgccggctggaatggctgcgcacttcgtcggccgggacgcaggagcattacttcaccatcgaactggagggggcgaccatcgtggatatccagtcacgcatgcccaactgccaggaccccgacaacgcccatttcactcacttggaagatgtgtacttcacctatcgcaagattgtgtggactcacgaagtgtccggtacttccgggtcggatgactggcgcagcccggttgcgggttaaaccggcttgacgcgggcgcggcgccaaggaaggcgccgtttccgtaaggcaactacaccatcgccaaaggatgcttgcgttttggcgcgccgaatacccgatcgatcgcgtccaggtcgtgctcatccaacaccagcttggctgctgctgcgttgagtcgcacgtgctcgggcgtaacggccttggggatggcgatcacaccgtcctggcgcaacacccaggccagggagacctgggcgggtgtgacctcgtgacggcgggcgatctgcttgagggtggggctggacagcagttcgccgccctgggcgatcgggcagtacgccatcaagggcaagtggtgctgttgccaccagggcagcaggtcgaactcgatgccgcgttcttcgatgttgtagagcacctggttggtggcgcaggccggggaggcaagttcctgcaggtcggccacgtcgaaattggagacgccccaacgtccgatcttgcccgcttcgcgcaggcgttcgaaggcttcgaccgtttcttccagcgggtactggccgcgccagtgcagcagatacagatcaatgtagtcggtgcccaggcgctggaggctggcctcacaggcacggggcacgcccttgtggctggcattgtgcgggtagaccttgctgaccaggaacacctggtcgcggcggccacgaatggcctcgccgaccaccgtttcagcgccgccctccccgtacatttcggcggtatcgatgagggtcatgccctcgtcgatacccagttgcaacgccgcgacttccgcgcggtgctggtcggggttttcgcccatgcgccaggtgccctggccgatgacaggaacgggaacacccgccagatcaatggtatgcatgacaacctcctgatgagttcgcgaattaacagtgtggcattggccggacaaaagggttcaatcgaagtatggttagcctctgccaagtcgccaggaagtctctgcaatgctgtttgtcgtcatgctcgggggtaagcacccacgggcgaaaattgaagtgcacgatgtggtgtttgcagtggcggacacgctggaagcagcctacgcgcaactgcgcgccgattggtttggcagccccaagggcgtgcatatcgactcctggatggcggtggatggcgtcgacggctggaaggtcgaactcagccccctggcacctgccgccggcgcacaccacctgtacttcatcaacctgggcggttatgaggccaacagttttggcgaggcccaccactacctcctggtggccgcccgcaataagcaggaggccacgaacaagggcaagcaacagatgctgcgtcactggtcccaggcccataccgatgaagtactggacatcgacgactgcttgcccatcgacctggtggacggtcgctatatccacctggtgcaaggcccgcatcggccgatcatccagcagaacgactacatcgtcctggcctgaaccctacccgacagtgcatgcgcagctcatcgaatggctcacccacagcggcgctatggcccgtgcctgagccactcgggcaatccggcggaactttgccgggaaataaccgcctgaatccggtaggctcaccttttttattcaaggagttacttcccatggccaaagccaccgcccgtcacatcctcgtttccactgaagacaagtgcaacgaactcaaggcccaaatcgaaggcggcgctgatttcgcagaagtcgccaaagccaactccagctgcccatccagccgccaaggcggtgacctgggttcgttcggtccgggccagatggtcaaggaattcgacaccgtcgtgttcagcgccccggtcaacaccgtgcaaggcccggtaaaaacccagttcggctaccacctgctcgaagtcaccagccgccaggactgatcccgcctgtgctgatgcaataaacaacggcccgccttttggtgggccgttgtgcatgtgatgactggcgacgctgatgccgttagcgtacaaatcccttttcttcttcatacggcgttcaaggctgacaatgcgattggctttttcttacttctttagctcgtccctggcactgctgctggccagcactgccgtgatcgcggcgcctcaaccgtacctgacggtgtatggcgaaccggccaagtaccctgccggctttacccatttcgactacgccaaccccaacgcccccaagggtggcagcctgcgccgctcggccatcgagatcgggcgcttcgaccatgtgttgccgtatatcgacaaaggcatcggggtgtcccaggtcgacggctggctctacgcgcccctggcccagcgctccctcgacgagccctacacggtctacggcctggtcgctgaaaaaatggagcgcgccgacgacggcctgtcgctacgctttttcctcaaccccaaggcgcgctttgccgatggcaagccgatcaccgccgaggacgtgcgctacagcttcgacctgctgatgacccagggcagcttgcgctttcgcaccctgttcgccgacgtcaagcacgtcgaagtcgaaggcgagcgccaggtgcgtttcgatttctccagcaatgaaaaccgcacactgcccctggatatcgccaccctgcctgtcttccctgagcattggtggaagacccgtgactttgccaatggcggcggctatgaagccccgttgggcagcggcccctataaagtcagcaagatcgactccggcagcaccatcacctttacccgcgacgcgagctggtggggcaaggacttgcccgtcagccgcggcctgtacaacttcgatcacctgagcctggagtatttcggcgacaccgaagtggcccgccaggtattgcgcggcggcgcctacgatttcaaccgggagttttccgccactgggtactccattggctacaacggcccggccctggatgatggtcgcctgcaacgcgcgcacctggccagggagatgccgcaaccggcccagggttacgtgttcaacgtacaaaaaccgatattcaaggaccgccgcgtgcgccaggccctggcgatgctgtgggattttgaatgggccaaccggcaaatgatgcggaacatgtacatccgccagcagagttacttctccaacagcccgctggccgccagccagccgccaacaaaagaagagctagcgattcttgaacccttgcgcggccaggtccccgacgaggtgttcacccaggtgttcaaggcgccggtcactgacggcagcggtgtgatccgcgacaagcagctgcaagccctggccttgctggaggaagccggctggaaaccagagggtgacaaattggtgaacgccgaaggcgaaccactggaattcacgttcctcaacactcagaacggcctcgaacgtctgttgttaccgtacaaacgtaacctggcgcaaatcggtattaccctgaatatccgccgtatcgactcctcgcaatacgtcaatcggatcatggccagggactacgacatgatcgtcatcggtttccccgtcaccacgtcaccgggcatggagctgtacaactatttcggctcggcggccgcctacgatccaggcgccaacaactacgcagtactcaaggaccccgccgtcgacagcctgatcaagggcctggtcaaggccgatacccaggcgcagatgctcacctacgcccacgcgctggaccgggtgctgcaatggaactacctgtggatccccaattactacccgcccggcacgtccgccgcgtggtggaaccgtttcggccgcccggccatcgaggcaaagaacgacgaagccctggaaacctggtgggaaatcagccccacgccgctgacgaatgaacaaatgaacgctgagctgaaaaaacgcggaggtgcgcgctgatgtttgcctatatcgtgcgacgcctgctgctgatcatcccgacgctggtgatcatcctgctggtgaatttcgtgatcgtacaggccgcccccggcggtccggtggagcaagccatcgcccacctgcaagggatcggcggcggtggcgtcggcggttcctccggcgaaggcatcagcggtggctcccgcgccagccggggcctggacccgaagctgatcgctgacatcgagaaacagtacggcttcgacaagcccgcgccggagcgcctgtggctgatgctcaagagctacgcccaactggacttcggcaacagcttctttcgcggcaagacggtgatcgacctgatcctggaaaaaatgcccgtgaccatttccctcggcctgtgggccacgctgatcacctacctggtatcgatccccctggggatccgcaaggcagtgcgccacggcagcagttttgatgtgtggagcagcaccgcaattgtcatcggctatgccatgccggcgttcctgttcgcgatgttcctgatcgtggtgtttgccggtggcacttcgctgaactggttcccggtacgcggactggtgtcggagaacttcgaagagctgagcaccgtgggcaagatcgccgattacttctggcacctggtattgccggttacttcactggtgatcggcgggtttgccacgctgaccatcctcaccaaaaactcgttcctcaatgaaatcacgcgccagtacgtggtgactgcccgcgccaaaggcttgagcgaacgacgcgtgctctacgggcatgtgttccgcaacgcgatgctgctggtgatctccggaattccccaggcctttattgccgtgttctttgccggttcgctgctgatcgaggtgatcttctccctcgacggcctgggccgcatgagctacgaggcggctgtgtcccgggactacccggtggtgttcggttcgctgttcatcttcaccttgttcggcctcttgataaaactcatcggtgacctctgctacaccctggtggacccgcgtatcgacttcgccgcgaggaacgcctgatgcttaatctgtctcccgtggcgcgtcggcgtttcgagcggttcaagaaaaaccgtcgcggctggtggtcgctgtggctgtttatcggtctgtttatcctgacactgggcggcgagttgatcgccaatgacaaacccttggtgctgagtttcaagaacgagctgtatttcccggtgttcaagcgctacaccgagcaacagttcggcggccagttgccgttccaggccgattaccgcagtgactacgtgcgaaagctgatcgagcaggacggcggctggatgctgttcccgccgattccgttcagcgacgacacgcccaactacgagctgacccgccctgcccccagcccgccctcggcggtgaactggctgggcaccgatgaccagtcgcgggatgtgctggcgcgggtgatctttggcgcgcgcgtgtcgatcctgtttgccctggcgctcaccgcgatcagcgcggccatcggtattgccgccggtgcgttgcagggctattacggcggctgggtggacctgatcggccagcgtgtgctggaagtgtggtccgggttgccggtgctgtacctgctgatcatcctgtcgggttttgtagagccgaatttctggtggctgctggggatcatggcgctgttttcctggctggccctggtggacgtggtgcgcgccgagttcctgcgcgggcgcaacctggaatacgtcaaggccgcacgggccctgggcctgggcgatggcaagatcatccgccggcatatcctgcccaacgccatgacggcgaccttgagttacctgccgtttatcctgaccggtgcgatttctacgctgagcgccctggatttcctcggtttcggcatgccggcaggcagcgcgtcgctgggtgagctaatcgctcagggcaagcagaacctgcaagcgccgtggctgggcctgaccgcgtttttcaccctggcgctgatcctgtcgctgctggtctttatcggcgaggcattgcgtgatgccttcgacccacgctcatgagtgactgcctatgaacctgatcgaaatccgcgacctcagcgtcgcgttcagcggccagaccgtggtgcgcaacctgtgcctggatgtgcgccccggcgagtgcctggcactggtaggcgagtcgggctcgggcaagtcggtgacggcccactcgatcctgcaactgctgcccgaggccggcactaaaaccaccggttccatcaagtaccgtggccaggaactggtcggcgcttcgaccgccaatttgcagaagctgcgcggcaaccgcattgccatgatcttccaggagccaatgacctcgctcaacccgctgcacagcatcgaaaagcagatcggcgaaaccctgctgctgcacaagggcttgggcggcaaggcggcgcaggcgcgcatcctcgaattgctcgaactggtgggcatccagaagcctcaggagcggctcaaagcctatccgcaccagctctccggtggccagcgccagcgggtgatgatcgccatggccctggcctgcgagccggaactgctgatcgccgacgaacccaccacagcgctggacgtaaccgtgcagcgcaagatcctgctgctgctcaagtccttgcaacaacgtctgggcatgtccctgctgctgatcagccacgacctcaacctggtgcgcagcattgcccagcgcgtatgcgtgatgcgagccggcgagatcgtcgagcaggccgactgccagacactgttcaacgcgcctcaacacccctacagccgcctgctgctggatgcagaaccggccggcgatgcactgtgcagcgatgcacgcgagacggtgttgcaggtggatgacctgaccgtgcaattcccccttggcggcgggttgttccggcgcaaaacgtatttacgtgcggtggatggcatcagcctgagcgtgcagcgcggcaagaccctggggattgtcggcgagtccggctcgggcaagtccaccctgggccaggcgatcctgcgactgctggactccagcggcagcatccgcttccagggtgaagccctcgacccgctgaaccaccagcagatgcgcccgtggcgcaagcaaatgcaggtggtgttccaggacccttacggcagcctcagcccacgcatgaccgtggagcagatcatcagcgaaggcctggaggttcacgcaccgtgcagcctggccgaccgcgatgcgcaggtggtgcaggtgctcaaggacgtgggcctcgatcccgccagccgccatcgctacccccacgaattttccggcggccagcgccaacgcatcgccatcgcccgcgccctggtgctcaaaccggcgctgatgttgctcgacgaaccgacctcagccctcgaccgcactgtgcagaaacaagtggtggcgttgctgcgtgagttgcaggagaaatacggcctgacctacctgtttatcagccatgacctggcggtggtgcgtgcgatggcccacgacatgattgtggtcaaggacggcaaggtggtggaggccggcgtgagccatcaggtgtttgatgctccgcagcatccgtacaccaaggaattgctggcggccgcctgcgggctgtcgtcatgagtaccagcctgacggattaccaacaggttcgcggcctggccatccagtcgctgttcgagatcatcgagcagtccagcgaaggcacggtgattgtcgaccgcgacgccaatatcgtgtggatgaacgagcgctacgccaggcgttttggcctcaaaagcgccgacgaagccatcggccagccgtgcgagcaggtgatttccaacagcttgctgcgccaggtggtacgcaatgaccagcccatattgctggacatccaggacacgcccaaaggcccgttggtggtgatgcgcttgccgatccacaacgacgccggcgcggtgatcggtgcgatcggctttgccttgtttgatgagctgcgcaacctgtcgccgctgatcgaacgctacctgagcatgcagcaggagttggcgtcgacgcgctccctgctgcgttcgcggcagagcaaatacaacttcgcgcattttatcggcaccagcgccgccagcctcgaagtgaaacgccgcgcgcggcgcagtgccagcgctgaatcgccggtgttactgctgggcgaaaccggtaccggcaaggagttgttggcccaggcgattcacggcgcctccacccgtgcgcacaaggcgtttgtcagcgtcaacagcgcggcgattccggctgacctgctcgaagccgagttcttcggcaccgcaccgggcgcgtttaccggcgccgaccgcaaaggccgccccggtaaattccagattgcccagggcggcacgctgttcctcgacgaaatcggcgacatgcccctgcccttgcaaagcaaactgctgcgggtgttgcaggaaaaggaattcgaaccggtcggttccaacgagatgctgcacagcgatgtacgggtgatcgccgccacgtccatggacttggaggcggcgatcaagcgcggcgaattccgcgcggatttgtattaccggctgaatgtgctgccgatccaggtgccgccgttgcgtgagcggcttgaagatattccggcgttgagcgaggcgattctggaggaactgcgcagccagcatgagctggaccgtgaagccctggcgttgctggcccagcatgcgtggccagggaatatccgcgaactgcgcaacgtacttgagcgggcggcgttgttgagtgatgaccttgtgttgaatgccggggagattcgcgccgcgatcggcaccttcacccccgtggcgcgtggcagtgccgtcgcgacggtcgagggtgaaagcttcagtgcggcgcgggagcggtttgatcggcagatcatcgcggcggcattgagcgcgtgcgaggggaatgtggtggaagcggccaagcgactggggcttgggcggtcgacgctgtacaagaagatggtggcgttgggcatcgactgatctcaaaatggagacacagctctcaatatagagataacccaatgtgagagggggcttgcccccgatggcagtgtgtcagtcaactcataggtgactgaagtaccgctatcgggggcaagccccctcccacattggtttatcatttgtctcaagctagagacaatattcggaacatccaaccacaacctataaattattcataaatttcaataagttaagaacatggcacatatctcgctatagccctctcctaaagcaacaccccacaaaaataacaatccgatggagacacaccatgagtgtgatcattgccctggcagccctcgcgctgctgatgctggctgcctaccgtggctatagcgttatcctgtttgcccccattgccgccctcggcgctgtcctgctcaccgacccgtccgccgtcgcccctgcgtttaccggggtgttcatggagaaaatggtcggttttatcaaactgtatttcccggtgttcctgctgggcgcggtgttcggcaagctgatcgagctgtcaggcttttcgcgctctatcgtggccgcggccattcgtttgcttggcacacgccaggcgatgctggtaatcgtgctggtctgcgccctgctcacctacggcggcgtgtcgctgttcgtggtggtgtttgcggtgtatccatttgcagcggagatgttccgccagagcaatatccccaagcgcctgatcccggcgaccatcgccctcggcgcgttctcgttcaccatggacgccttgcccggcacgccgcagatccagaacatcatccccagcaccttcttcaacaccaccgcctgggccgcgccgtggcttggcttgatcggcacgattttcgtgttctgcgccggcatgctctacctggcgcgccagcgcaacaaggcgcaacttgccggtgaaggctatggcacggagctgcgcaacgagccggaaaccgccgagaacctgaccctgcccaacccctggatcgcgctgtcgccgctgatcctggtgggcgtgatgaacctgctgttcactcactggatcccgcagtggtacggcaagacccacagcctcagcctgccgggcatgagcacgccggtgaccaccgaaatcgccaagctcaccgcgatctgggcggtacaggcggcgttgctggtggggattatcgtggtgctggtgttcggcttctcggcgatcaagagcaagctggccgaaggcagcaaaagtgcggtcagcggtgcgctgctggcggcgatgaataccgcctcggaatatggttttggtgccgtgatcgcctcgctgccgggctttctggtgctggctgactggctcaagagcattcccaacccgctggtcaatgaagcgatcaccgtgaccctgctggccggtatcaccggctccgcgtcgggcggcatgagcatcgccctcgcggccatgtccgaaagctttatttcggcggcccatgcggccaatatcccccttgaagtgctgcaccgcgtcgcggccatggccagcggcggcatggacaccctgccccacaacggcgcggtgatcacgctgctggcggtcaccggcctgacgcaccgcgaagcctacaaggacattttcggtatcacgatcatcaagaccctcgctgtgttcgtggtgatcggtactttctacgccaccggcattgtgtgaggtttgcatgacgacattgaacggcaagaccgccctggtcaccggctccaccagcggcatcggcctgggcatcgccctgagcctggccaaggctggcgccaacctgatcctcaatggcttcggcgacgccagcgcggtgatcacccaggtacaggcgttcggcggcaaggtcggccaccacccggccgacgtcagcgacccggcgcagatcgccgacatgctcgcctacgccgagcgtgaattcggcggcgtcgacatcctggtcaacaacgccggtatccagcacgtggcggcggtggaagacttccccgtcgagcgctgggactcgatcatcgcgatcaacctgtcctcggtgttccacagcacgcgcttgagcctgccgggcatgaaggccaagggctgggggcgtatcgtcaacatcgcctcggtgcatggccaggtgggttcggtgggcaaggctgcgtatgtggcggccaagcatggcgtgatcgggttgaccaaggtggtcggcctggaaaccgccaccagcaatgtcacctgcaacgccatctgcccgggctgggtgctgacgccgctggtgcagaagcagatcgatgatcgcgccgccactggcgtcgacccgcagcaggcgcagcacgacctgctggcggagaagcagccgtcgctggagtttgtgacgccgccgcagttgggtgagctggtgctgttcttgtgcagcgaagccggcagccaggtacgcggtgccgcatggaatatcgacggcggctggctggcccagtaacagcggacactggcgttcaaaatgtgggagggggcttgcccccgatagcggtgggtcagtcaccccatgtatcaattggcactccctcatcgggggcaagccccctcccacatttgaactgtattgtgtggaagacctagataagaacaagagaccttgctgatgtccgacattctctggcaaccctccccggaacgcatcgccaacacgcgcatggaccagttccggcgccacatcaacaagcgttacagcgtgcagcttggcgactacccggcgctgcaccagtggagcatcgaccaacgcccggatttctggcgggcgatcgttgactatttcgacgtgcagttgcgcagcccgcccaccgcggtgctgatcgaagacgccgagatgcccagcgcccactggtttcccggcgcgacgctgaattttgccgaacacctgctgcgccggcgtgatgatcacgtcgccgtggtggctatcgcagaagacggccagcgcgagcaactgacctatgccgagctggccgcccacgtcgccggcctgcaacgcagcctgcgcgctgccggcgtgacccaaggcgaccgcgtcgccgcgtgcatgcccaacacctggcaaaccctggtgggcatgctcgccaccaccagcctcggggcgatctggtcgtgctcatcaccggacttcggcacccagggcgtgatcgaccgcttcggccagatcgaacccaaggtgcttatcacctgcgccggctaccgctatgctggcaaagacatcgaccagaccaccaaactcaatgaaattctcgcgcgcctgccgtccttggagcagttgatcatcgtgccgtatgcgcgcccccaggccaggatcgaggactatcagacccacgcccgcgtcgcgctgtggcaagacgtctaccaacccggcggcgagcctgaattcgtcgcggtaccgttcgatcatccgctgtacatcctctactccagtggcaccaccggcgtgcccaagtgcatcatccacggcaccggtggcgtgttgctcacccacctcaaggaacacggcctgcacgccgacctgtcccgcgaggactgcctgttctactacaccacctgcggctggatgatgtggaactggctggtgtcggtcttggccctcggcgccacggcggtgctgtatgacggctcaccgtttcaccccggccccgagcgcttgatcgacctgatcgatgcggaaaaaatcagcgtgttcggcaccagccccaagtttctcgccacgttggaaaaggccggattgcggccgcgcttgagccacgacctgggcagcctcaaagggctgatttccaccggttcgccgctgtcaccgcagagctacgactacgtgtaccgcgagatcaaggatgagctatgcctatcgtccatgtccggcggcaccgatatcgtctcctgctttgtgatcggcaacccggtgctgccggtacggcgcggtgaaatgcagtgcaagagcctggcgatggctatagaagtctgggacgaccagggccggccgctggtcggcgaaaaaggcgagctggtgtgcacgcggcacttcccggcgatgcccatcggcctgtggaacgacccggaccgccagaagctgcgcgcctcgtatttcagccagtttcccggcgtgtgggcccagggtgactatgccgagcaacgcccgaatggcagcctgctgatccacgggcgctccgacgccgtgctcaaccccggcggtgtgcgtatcggcactgccgagatctaccgccaggtggaaaaagtcccacaagtgctggaaagcctggccatcggccaacgctggcaggacgacgtgcgcgtggtgctgttcgtgcgcctcaatgacggtatcgaactggacgaatacctcgaacagcagatccgccaggtgatccgtgccaacaccacaccgcgccatgtgccggcgaagatcctcgctgtcaccgatatcccccgcaccatcagcggcaagatcgtcgaattggcagtgcgcaatgtggtgcacggcgagccagtgaagaacaccgatgccctggccaacccccaggcccttgatcagttccgcaatcgcccggaactggcgcaaggatgaaaggtttcagcgctgacgtactcatttgaagacaaacccccaatgcatgctatttttcgggggtagtcacccatcgccgactgacgggataatgggtgttgtcatttttcaaagcgttacgctcagggctttttcatgattggaacatccgccggcagcgaagccgccgcattgattgcgcggctggactgggcgcaaagccctctcggtgaggccaaagattggccgcaaagcctgcgcacggcggtcgatatcgtcgtgcactcgccgatgccgatgctcctgctgtggggcaaccagctcacgcaactctacaacgacggtttcgcccaactggcgggcaacaagcaccccgaggccatgggccagccggcgcaccagacctggccggagcttgagagctttaccgcgccgatctacgacgccgtgctcagcggccaggtgcgcaccttcagcgagcagcgcttcgtactgcaacgccacaatcgcgacacggaaatctggctggacctcacctacagcccgatccgcgatgaaaccggcagcgtggccggcatcctggtcaccgccatcgaaaccaacgaacggcgcaaggcccagcacaacaccgagcaacgcctgcaactggcactggcggccaccgacgccgtcggcacctgggactgggacattggcgaagaccgttttatcgccgacacgcacttcgcctacctgcacggtgtcgaccccagcgatgcaagccggttgccgatcagcgcctacctgcaaggcgtgcacccggatgaccgtggcatggtggcgcgcagcatcaagcattgcatcactttcggcaccgaatacgccgaggaataccgcctgctgcaagccgatggccaactgcgctgggtgtttgcccgcgggcgctgctacaaggaccatcaaggccgcccggcgcgcttcctcggcgccgcgctggacctgaccgagcgtaaacacaccgagcaggcgttgcgccaaagccagaccgaactgcagttgatcatcaacgccatgccggtactgatcggttatgtcgaccatgaacagcgctttcgcctgaacaacagtgcgtacctggagtggtacggcatgacgccccaggaactgtacggcaagaccattcgcgaagtgctcggcgacgaggtgtacgccgggcgtgaagacaagatcgccgctgcgctcaagggcaaggcctgcagcttcatgaccattacgccgcaccaggatggtcgaccacgccatgccctgatgaagtacctgccacgcttcagcaatgacggttcggtgaatggtttctacatctttgtaatcgatgaaaccgaacgcaagctcaccgaagaagccctgcgtcacctcaatgaaaacctcgaagaacgtgtggcccagcgtacccaggcgctggccgaggccaaccagcgcctgcagaacgagatgttcgaacgtgaacgcgccgaagatgcattgcgccatgcgcagaagatggaagccgtgggccagctcaccggcggcatcgcccatgacttcaacaacatgctcaccggcatcatcggcagcctggacctgatgcagcgctacatcgccgccgggcgcagtgacgagatcgggcgcttcactgatgccgccgtgtcctccgcccaccgtgcggccgccctcacccaccgcttgctggcgttctcgcggcgtcagtcgctggaccgccgcccgctcgaccccaaccagttggtggcctctcttgaagagttgttccgccgtaccaaaggcgcgcatatcagcctcaaggtgcagctcggccatgacatctggccggtgaacaccgacgccagccaactggaaaacgccctgctcaacctggtgatcaacgcccgcgacgcgatgcccgatggcggagaactgctgatcgaaaccgccaacagttacctggacggcaccgacatcaccaccctggaaccggtcaaggccggtgactacgtgatgctcggcgtgtgcgacaacggcaccggcatggcgccgaagattctggccaaggcgttcgacccgttcttcaccaccaaacccatcggccagggcacgggccttgggttgtcgatgatctacggctttgcccagcaatccggtgggcatgtgaccatccacagcgaaccgggccagggcacctgcgtgcgcctgtatttgccgcgcctgcacggcacctccctggaaagcagcttgcccgccagccacagtgaagcgccggtggccctggccggtgaagccgtggtggtggtcgaagatgacccggcagtgcgcatgctggtggtcaatgtgctcgatgaactgggctacacggcgcaccaggcgggcgacgctcgggccgcactgccgctgctggagtcggatctgcgcgtggacctgctggtgactgacgtcggcctgccaggcatgaatggccggcagcttgcggaaatcgcccgccagcaccggccggggctgaaggtactgttcatgaccggttatgcggaaaaagccgccgagcgccagggtttcctggaagacggcatggacatggtggccaagccgttttccatcgagctgctggcgacaaaaatccgcagcatgatcaacgccaacgaatgagttcaggcataatcgcgcgccgtcgcacacctggtagagatcaatgaaagcccaagcccgtcatatcctggtgaaaaccagcgaagaagccgaacagctcaaacagcgcatcgccaagggcgaggcgtttgatgtgctggccaagaagtactccacttgcccgtccggcaaacgtggcggcgacctgggtgaagtgcggcccgggcagatggtgggggcgatcgatgcggtgatcttcaagaaaccggtgaaggtggttcacgggccgatcaagagcaagttcgggtatcacctggtgcaggtgttttaccgggattgatgggttggctgcagaccgctatcgggggcaagccccctcccacatttgaataggttcacaaatcaaactgtgggagggggcttgcccccgatccgccgcaggcggccattcacccccggggaatcagcgcccccggcacctggataacccgactggccaaccgatgcccagccaatgcagcctgctccggcgagcttcccttgagccgcccggccaggtacgccgcactgaacgaatcccccgccgctgtcgtgtccaccaccttttccaccttgatcgccggcacgcaaaagcgctcgccgttgcagcggatcaggcacgcatccgcgccacgcttgagcaccacctcttcaatccccggatacgccgcgaacacctgctcgctgtcggcatacccaaacagcgcacgctcgtcgtcctcggtgagcaaggcgatatccacttcggccaggacacgctcatacgcagcacgcgccgcctcgacgctcgcccacaatcgcggccggtagttgttgtcgaacaccaccttgccgccacgtcggcgggtttcgatcagggtttgcagcaagcgttcgcggccgacttcacccagtacggccaaggtgataccgctgaaatacaccacgtcatagcccggcagcgcggccaggatcggctcggctgccggcgtggtgaagcagtcgcgcacggcggcttcgttgcgccaatacaggaatttgcgctcgccattggcgtcggtctggatgcagtacaaccccggcagacgtccaggcaggcgctggaccctgcccaagcccaacccttcgtcgatccactgctggcacatggcgtcactgaaactgtcatcccccagggcggtgacatagtcgacgctgccgatgtcgcccagctcgcggcgcaggtacaccgccgtgttcagggtatcgccgccgaagctttggtgcaggctgccatcggcgcggtgttgcagttcgatcatgcattcgccgatcagggcaatgcggggttgggtactcatagtgatggtctcgggtgtggctgatggcctcatcgggggcaagccccctcccacagtttgatgtgtgaacctattcaaatgtgggagggggcttgcccccgataggatcgacgcggtctagaagcaggtaggcagggactcgatcacctgcaatttttcatccaccaggcaaccgacctgccacttgtcgaaggtcaggcaagggtgcgaggtgccgaacgagatgatgtcgccaatccgcaactcaacccccggcgccaccgtcatgaacgcatgctggtccatcaccgccgtaaccttgcagccactcacgtcatcgccttcggccggcacaatacccgccttgtagcgcttgagcggcaccggcagaccggcgtcgtaggccacgtcacgcttgcccagggcgatcaccgcaaagcccggctcgggcaacgattgcacatgcgcccagacttccagggccgggcgcaggccttcgttgaggtcactgcggcggtcgagcacgcagcattgcgcatctttatagatgccatggtcatgggccacgtagctgccggggcgcagcacactgaggaagcggccggcggcgttctgttgttcgaacgactcggcgatcaggtcgtaccaggccgaacccgacgcggtgacgatgggcttgggcaggtcgaaagagccgttgctctgcaaatccaccgccaggcgcaccaggctggcggcgaaatcgcggatgccgctgatggcatgctcgccgtggatcacgccctcatagccttcgataccggtgagagccagggccggctgggccttgatcgccttggccagctcgcgcacttcctgctcgctgcggcaaccgcaacggccgccgaccacgccgtactcgatcatcacattcaggcgcaggccacgggcggcgaagaacaggcccaggtcagcgacgttgtccgggtgatcgaccatgcagtggaagtcgaagtccttgtcggccagcaggtcagcgatcaacgccatgttcggcgcgcccaccagttggttggccatcaacacgcggcgcacgccaccggcatacgcggcgcgggtctgcacagcgttggccagagtgatgccccaggcgcccgccgcgatctggcgctggaacagcgccggcatcatgctggtcttgccatggggcgcgagctgcgcgccgctcttgctgacgaagtcctgcatccaacggatgttgtgttccagcgcgtcacggtgcagcaccagggccggcaggctgacgtcacggaccagatgggcaccgacagcggcggcgcctttttcaacggcattgatggcagacatgaaatgctcctattcgttgatgcgacgagccaggttgttggcgctttcgatcaacacccggcgatagtcgttgtaatttttgatcgcgtcggcgcgcggggcgacgatgcacaaagtcgcaatgctgatgccttgcgcgtcccgcaccggggcggcaaagcaatgggtaaaggtgtcggccacactgtcgaaggaaaagaagccatcgagggtggcctgacggatttgcgccaggaaggtatccagcggcaggcgctggccatccggcaggatgaagtcgtcgtggtcgatcaggtcgacgatctgctggtcgctcaagtgccccagcaacaggcgcccggaggcagtccaggggattggcgcgttttcgccgatatccgaagaaatgcggaaatgccgctcgccctcgcgcatcagcgccaccgtgtatttgcgcccgttgagcaggcacatctgcgcggtttcgcgggtctggctgacgatctcctgcaaggcgtgatcggcctcgcgggtcaagtcgaaatgacgcaggtgcgcctggcccaggaagtacagctggcggccgaggtagacgtgaccgtccttgcccaccgtttccaaaatacgacgttcaagcagcgacgcgaccaattcgtagacagtggatttggggctgccgatgccgctggcaatatcattcgggcgcaggggctggccgatttccttgaggaaatcgaggatatcgaatgcccggtccaggcctttggcgcggcgtttgatggtgtcttcggtcatggcagccttcgattcctgtaaaaatgctgtgatctgcgcagatccttgtgggagggggcttgccccgatagcggcgagccagtgacctgtgcttgtgctgacacaccttcatcgggggcaagccccctcccacattggattttccgtggtttcaagaatggggcatttagccctttttcttgtaggccacgcaatcgatctccaccttgcagtcgaccatcatgttcgcctgcacacaggcccgcgccggggcatgttccggggtgaagtattcgccgaagactttattgaaactccagaagtcccgcgggtcctccagccatacccccacgcgcaccacatctttcaattcgtagccagcctcttcgaggatcgccaccacgttgcgcatggtctgccgggtttgctcaatgatgccgccagtgatgatttcgccatccaccgcaggcacctggcccgagacgtacaaccaaccgtccgcttccacggcgcgggcgaaaggacggggttggccgccgccggcagtactgccggcaccataacgagtaatgctcataacaacaggctcctgattaaaaacgaatgttcttgagaaattccgccaggcgcggcgattgcgggcgttcgaagatgtccttcgaggtgccctgctcttcaatgcggccctggttcataaacacgatcttgtccgagacttcataggcaaagcgcatttcgtgggtgaccagcagcatggtcatgccctcttccgccaggcccttgatcacgctgaggacttcgcccaccagttccgggtcgagggccgaggtgacttcgtcgaacagcatcaggctggggttcatggcaatcgcgcgggcaatcgccacacgttgttgctggccaccggacaactggccgggaaagtggttacgacgctccagaagtcctacacgatccaaccatttttccgcgagcgccaccgcctcgtccttaggcattttcttaactttcaataagcccagggtgacgttttgcaacgccgtcaaatgcgggaacaggttgaactgctggaatgccatgccagtcatcgcccgatgctgggcaatcacgcgctcggggtgacgcacgcgcttgccgccgatgtcgcggtagccgatggactcgccgtccagggtgatctgcccgccctggaactcttccagcaggttgacgcagcgcaacagggtggtcttgcccgagccgctggagccgatcagggtcaccacgttgccgcgctgcatggacaggtcgacgcccttgagcacttccacctggccgtactgcttgcgcaggccactaatgttcagcaagggtgggttggtttgaggttggttcatggcaaggccacccgcttttcaatgtagcgcccgaataactcgatggcgtagttgatgacaaagaacataaagcctgcgaacaggtagaactccagggtcatgaaggtgcgtgcgatcacttgctgggtgctcaacagcaattcggccacgccgatcaccgacagcaaggtcgaggccttgacgatttccgtggaagaattgacccaggtcggcaggatctggcgcaacgcctggggcaacagcacgtagcccagggactgatagaacgtcaggccgatggccttgcccgcttccagttgcccacggggaatggcctgcagcgcgccgcgcacgatttccgaaacgtgggagccgcagaacagcgtcaacccgaccgcaccggcctggaacgcagtgatctgccaaccgagcgccggcagcatgtagaagcacgccaataccaacacaaacaccggcgtaccgcggatcaggtcgacgtacagccggaacggcgcccgcatccagaatttgccgtaggtcaggatcaacccggcgacgataccgatcagggtaccgaagataatcgccagcgcggacacataaacactggcttgaaagcccgcccagagggtatcccgggcgatccacaactcatgcaaccagctgggggattcgtacatggaaaccttccttaacgacggatcgccagacgctgctccaggtaacggagcagcatggcaatgaggtaacaggcggccacgtagagcgcggtcgtgaccaaccaggtttcgatcacccggtagctttcgacgttgatcttgcgggcgtaataggtcagctccggcaccgcgatggcggcggcgagcgaggtgtccttgaacagcgaaatgaagttgttcgacagcgcgggcagcacattgcgcagcatcaccggcacggtgatgtaggcgcggatacgccactcacccaggccgatggccagcccggcttcacgcaagcccttgggaatattcagcagcccggcgcggaacacttcggtcagataagccccggcgtacaacgacaaggtgatgatgaacgacgggatcttgtccaggcggatgcccaggctgggcaaggcgaagtagatcaacaggatcaacaccaggatcggcgtattgcggatcaccgtcacatacaccgaggccagcacgcgcagtgccttgtgtttcgacagcatggcaaatgccatcatcaagccgatcacgcagccaatcgcaatcgacagcagcgccagctcgaggcccaggccgagccccgccagcaagctggggaagtcgcgccacacggcggcaaagttcaactgatagttcatggtcagcagtacctgattggggcgccgtcagcgacgccccaggttttcgatttacttgaactcaaccgggaagccgatcgcaggttccggcaggtccacgccgaaccattgcttgaacgaggccttgtaggtcgggaactccacgccggtcatggcttcatgcagcgcggtgttgacgaagttcagccagtcctggtcgccacgcttgacggcgcatgcgtaggtctgtgggctccaagcgtacgtcgggctgcggtagcggcctgggttctgcaccatcaggtatttgaccgaagactggtcggtggcggcggcatcggcgcgaccagaattcacggcctggtacatcaggtcgacgctgtcgtactggtcgaccttggccttgggcagcgcctggtgcaccagttcttcggcgtagacgttttgcagcacggccacggtgacgctgtcgccggcggcctgcaggtcttcgatttccttgtacttgctgttgttcggcagcagcaggcccacgccttcgcggtagtacggcagggtgaaggccacctgctgcgcgcggctggcggtgacggtgatgaactggcaactcatgtcgaccttgtcggtgagcaggttggggatgcgcgcgtcagaggactgcaccacgaactcgaccttgctcgggtcgttgaacaaacccttggccacgatgcggccgatgtcgatatcaaacccctgcaacttgccatccgctccctggaagtgccacggcgcattggtactgcctgtacccacgatcaggtgcccacgcttgagcacatcatcgagcttgctgtccgccgcctgcactacgcttgcgagggaagccgatgcggcgaagagaaaaacacacgctttgaacacggaaggtcggtgatgcatgacaagcactccaggggttgtgtattccgctataccggaacttagtatgtaacaacggaatagacagcagaaagtgtgccacacgcggtaacggaaaaacacgacatgaataaatctgttttagatcaaatagataaaagatgattcgtgacaaggtgctaaccaacacttgaaatcactttgctacgcaaggccccacacagcggtgacaggccccactggcgtgcgacatagcggcgttaccgcgcaccgttgcagtgcgccggttgcgtggaaaaatccccacgctgggctagccttggcacattcattccaacaaggactccaccctgatgacgtttcgcctcaccctggttttgctgtcctttctggtggccggcaacgctctggccagtaacgaccgccgcgaatgcaaggcagagctgcgtaagctcaacgaagccttgagcaccaattacaccagccagaaccaccatggctaccgccaggcaaaggcctcaagggataacctggaatacaagaaatgcgcgagccaggcgcgtaaagcccgtgaacgcttggagcgtgacagggacctgtgaaggttgacagtagacgactgacgcctccggacttagcgtgagctaggtttctgactggagaacgtcaatgagctatttcaatgcggttatcgagaacaaagaagcttttgaacaagctctggatacaccgctcaccgtgtttgccctgttcgcctccgaaggctgtcacgcatgcaatgtgaccctgccgtggttcgtagaaatcaccaaagcgcaccagggaaaaatcaaggtattgatcctcgactgcgcgaatacgcccagacaccccaaggtcgtgcgtattccaacgctacttatctaccaacaaggtcagttgatgtcgacccttgaaggggttaccgagtcggctctgctccaggcactcgcagagtttgcttgatcaacctggcggttgcgcgacacgaccagcgtctacgcggctcaaagcagtctcagccatcagggtcagccatgttcaagaccattgaagcctaagtcctgaagaaacacccctcatccgccttgcaacttgagttcgcccagcatgatttcgagcgactcaagcccttatgcctgctgatctatatcgcgagcatctgcatctggctcgtgttcgacctgatcgtgagctttccgggcggccagggctttaccggggggccacttactggataatagctcaatgccttcattgagttaatgttcggcaccccctctaccgcctcgatggattttcttctgcgtatggacactcctctgcttccacaaaaacgcctcaatgctgcaatcaccaaagtaatggccggtatcagcgcaacgctgggcgccatgtgggcgctgatcacctatgtgtttcccgaccccagcgtgttcggctttggctttctcaactggaaaaacttgatactggtaatcagcgtattcctgttcctcgcggcagtgtctattggatggcaggcgcgtcgcctgccggacgcgataaaaggcacgctttcggtgatcctggccgtactgctcgccggcggttttttcattctgggtagcgagtacgccaaacccactttcgaatttgcccaatcacaaaagttgatgactgaaaatgacggcgccaacctgtttggcaagcgtatcgagctagtcgacggtgtacgcttcgaactgctggagtgtgagcagattggccaggcaccgagctgcctgctggaactcaccaacacccatgtcgaccgcgaaatgcgcgacctaaagcaaagtactctgtttgaaaaaaccggcggttctctggatgtcgagcaactgcttgttggccagtcaaagtctgaccagtggaacgcctttgcgttagtgcgcaatgtgccgacccgcgtaacgatggtgttccaacccgtgcgcgggaagctggagagcatcccggcactcaagatcaggtttcgcagcctcaagggcgaggataacgtggtcaagttcagtggcgtagcggttaactgaggggatggatatgagcaccgcaactgcaacagagaacgccgaccagccctgggaagctacgttgattctggcgtttcgcgatattcagtggatccttcactgcgaaaaacagcaggcactgatttcagtcgcgcttgcccagttcctcttggacaatcaatcactgctgtgtaatccctcggacccaacacagcaaaatacctgcaatgagaccaagggaaagctctaccgggcagtggaaaaaatggcggtaacgccgccactcctcgcgaaattggacggcaaggctgaaagtgcagcgggcgacgtgctaaccgcccatgaagaccggttcttcctgattgaattcaaatcggacatcagcaccagaagctccgaatacaccaaattcctggggattctgatgtggctgatcgatcccgacgccaaccacgtactgatcaagcggtcaaaaaaggggcatttttttgtcacacagcagcccgacgcatccgcaccctctaacccaaacctgcgcaagctcactatggaggcctacacttactacgacgctatcacccagcccgacttaaaaccgactgcggcgatccccgtgcatacgctcctggcggaaaaacgccacggcctgtcgctggctcacatggcggactaccttcaactgctctgcaaggcccatgtcggtgactcagcaggtggcgcgcacccgatgaaagtggcggtggcaagtgcatccgggatgttctggccgataaccgacctctcggagctgagtgcattggccggcttgttcaacacgaccgcagggccatcgcgcccaacacacccggcatttggcactgcaaacgccaaacacttgaaaggcatcgtcgatgccttccgaaaaaagacgccggcgcagcaaaaagccgcgctcagacgtgacggcagaacacccggcggcgccactccaggcctcaaaggaagctgagtggcaacacttgcacccccatcaggaacccacgcaccgaagcaggctgacctgcgtcacccggcggtcttccacagccgccacggtcaagcaccaaccctcatgctccaggctgtcacccaccaccggcaggcgatcgagcagactcatgaccaggccggccagggtctgatagtcatcggtggcgaccgcgttgaaaccggtacgctggcgcaccaggctgaggttcaaagcgccattggcgcggaacccatcaccctcctcgacgatgtcaggcccttcgatttcgctggcatccggcaactcaccggcgatggactcgagaatgtcggtcatgctcaacacgcccataaagtcaccgaattcgttgatcacgaacgcaatgtgggtggattcctgacgcatctgctccagcgcattgaggatcgagaaactctcgagcaaattgatcgcccgacgtgccaggtgctccaggttcggctcgttgccggccaggtattccttgagcaattccttcttgtgcacaaagcccagcggctcgtcgacggcgccgttgcggatcaacggcagtcgcgagtaggacgaatgcatcagtttcaggcggatactctcgggatcatccgccagatcgatgcagtcgaccttggcccgtggcgtcatcagcgtgcggatcggtcgctcggccagttgcagcacaccactgatcatcacgcgctcacgtcgatcaaacagcgggccttgagtggcatccggctcgccgagcaggtcagccacctcgtcacccacctcttccaacgccaggctgcgaccgccgagcaggcgcatcaccgcatgggcggtacgctcgcgcaccggcaacacgccttgcgccgacttcttgcggcgtgaacgggcgatctggttgaacacttcgatcaggatcgagaagccgatggccgcgtacaggtagcccttgggaatatggaaacccaggccttcggcagtcagggcgaaaccgatcatcatcaggaagcccaggcacaacatgatcaccgtcgggtgcgcgttgacgaagcgggtcagcggcttgctcgccacgatcatcaggccgatggacacgatcaccgcgatcatcatcaccgccagttcgtccaccatgcccacggcggtaatcaccgcatccagggagaacaccgcgtcgagcaccacgatctgcgccacgatcggccagaacatcgcataggccacattgcccgtgcgctgggccacatgcccttcgaggcgttcgtgcaattccatggtggccttgaacagcaggaacacaccaccaaacagcatgatcaagtcacggccggagaagctcttgtcgaacacctcgaacaacggctgggtaagggtcaccaaccaggaaatactcgccaacaggcccaggcgcatcagcaacgccagggacaggccgatcaaacgcgcacggtcacgctgctccggcggcaacttgtccgccaggatcgcgataaacaccaggttgtcgatgcccagcaccagttccagcacaatcaaggtcaacaggccgagccaggccgttggatccgctaaccattccatttatagagtctcttcaatcggttttcagaatgccggacacggcgaggcgcggtcggtggaccggtacagggctggcaatcggaatacggggtgcttcaacgggaacagcggcagcggatgtcttggggaaagacgactgggaggctccgagagggtgttcatgcaaatcctgcaattacaaaaggacttgaatcgtacagtcgaaaggcaaatttcccacaacccaaaactattacaagatctgtaaaacctttcacaccaattcgatcacttgatcaccaaatgaaattattatcactgcaaacacatcaaaacccatgccaaaaaccgacaaaaacagcctaaaaacctataagccagcctatttcgcagtttttcgtgaaagaatttgactgatcagaatttcatttgataaacatatgatcagtacaggcaatgaatgaacgactgactacaacaataaatggggtgctcatcatgaaacttgctacgaccttcgccgccgctgcggccctctccctcctcgccagcagcatcgccctggccgccgacggcaagacctacaaggtcggcgccgcggtctacggcctcaagggccaattcatgcagaactgggtacgcgaactcaaggagcaccccgccgttaaagacggcaccgtgcaattgaccgtattcgacggcaactacgacgcgctgacccagaacaaccagatcgaaaacatggtgacccagcactacgacgccatcctcttcgtgcccatcgacaccaaggccggcgttggcaccgtgaagcaggccatgagtaacgacgtggtggtcatcgcctccaatacgaaagttgccgatgccgccgtcccctacgtgggtaacgacgatgtggagggcggccgcctgcaggcccaggccatggtcgacaaactcaacggcaagggcaatgtggtgatcatccaggggccgatcggccagtcggcacagatcgaccgggaaaaaggcgagctggaagtgctgggcaagcacccggacatcaagatcatcgagaaaaagaccgccaactgggaccgcgcccaggccatggcactgaccgaagactggctgaacgcccaccctaaaggcatcaacggcgtcatcgcgcagaacgacgacatggccctcggcgcggtacaggccctgaaatcccacggcctgacctccaaggatgtgccggtcacctccatcgacggcatgccggatgccatccaggccgccaagaaagacgaagtcaccaccttcctgcaggacgcccaggcccagtcccagggtgcgctggacgttgccctgcgcgctttggccggcagcgactacaagccccgctcggtaatctgggaacgctacgccaaggatgtgaagtgggctgacggcaccgcgaagaactacatcctgccctgggtgccggtgaccaacgccaacgccgatgcgctgtacaagcaagtcagcggcgccaagtaagccgtcgccggttgatcgctccccgtatgggagcgatccgttcatctttgttgtgaggcctgccatgtccactgtcaccgaacgcccgcaagaacaactgcatcccgccatccccaaaaccatgcaggccgtggtctgccatggcccggaagactatcggctggaaaccgtcgacgtgcccacccccggccccgaggaaatcctcaccaaggtcgagttgtgcgggatctgcatgggcgacatcaagacctatcgcggcgcgccgtcgttctggggcgacgccgagcaaccgcgctatgtgaaaccgccgatgatccccggccatgaattcgtgtgccgcgtggtcgccctggggcctggcgcggaaaagcgcggtatgaagatcggcgaccgggtcatttccgagcagatcgtgccgtgctggggctgccgcttctgcaaccacggccagtactggatgtgccagaaacacgacctgtacggcttccagaataacgtgcagggcgccatggcccagtacatgatcttcaccaaggaaggcatcatccataaggtcccggattccatcgccccggatgaagcgatcctgatcgagcccctggcctgctcgctgcacgccgccgaacgcgccaatgtggactttgatgacgtggtagtggtcgccggtgccggcacgctgggcctgggcatcattggtgcggtgcgcatgcgcaacccaaagaaactcatcgtgctggacatgaagccggaacgcgccgccctcgccctgcgcatgggcgccgacgaggtgtggaacccggccgaagtcgacgtgctggcgaagatccgcgacatcaccgatggctacggctgcgacatctacatcgaagccaccggccatcacaaggcggtgaaccagggcctggcgatgctgcgcaagctggggcggttcgtcgagttcagcgtgttcaatgacgaggccacggtggactggtcaatcatcggcgaccgcaaggaactggatgtgctcggctcgcacctggggccttacatgtacccgcgcgccatcgactttatcggcaaccgcaagatcgacatgcgcgacgtggtcacccacaaattcgccctggcggacttcaaggaagcgtttgcggtgatggagcgcggcgacaagtccctcaaggttgtgcttgagccctgacctgctggatataccgcaccactgccggcgctttctcgaagcgccggtaaatcaacgacaaccaggacgacgcctcattgccctggatcgcgcggtacaccacccccggcaagctcacatgccccaccaccgacgtcggcaccaccgccacgccctgccccaatgacaccaacgcaacaaccgccaccaacccacccggctgcggccccaggcgcggcgcaaaaccaccttgggccgccacgtgcagcgtgccgctgatctgttccggcaggatgaaggtctcgttttgcagatgctcgcagtggatgaccttcaaacccagcagccatgaatcctgcggtaacgccagcacaaaaccgtcactgtccaggcacacggcttccacaccgtccggcaaggtcatcggcgaacggatgtagccgatgtcgtagcgcccgtccgcaacggcgcctggcagtgtggccatggcgcattcgcgcacgttcacgctgacatcgggaaacgcctggcagaacgcctgcatctgccgctgcaacacgccggaatacacggcagaagccacgtagcccaactccagatggccgatctcgccacgcccggcacgctgggcattgcgctgggcaaactcgaactgacgcaccgtcgcctccgcttcgatcagcagcgtggcgccggcctcggtcaggctgacttcgcgctgctggcggacaaacaggcgcgtgcccaggctggtttccatgtcctggatctgtcggctcaaagtggggggtgcgatccccaactgctcggcagcgcgggtgaagttgcgctgacgggcgacggccaggaagtagcgaaaatgacggatttccatttcagcattagctcaaaggtaatgaaatgagtcagcctggctaataaaggcgctgggcagcgcggatatgctgaggcaaaccagaacagtagagagcccttgcgatgtccgtcaactgcattccgcctattgcctttgaggtaattcaaccatgagccgggtcagcccacgcctgaccctgctgaccgcgtccggcgtctgctcgctgatcgtgctcgacaccaatatcgtcgccgtgaccctgccgagcattgcccgcgacctcggggcgaacttcgccgatatcgaatgggtggtcagtgcctacatgctggcgtttgccgcgttattgctaccggccggcagcattgccgaccggttcgggcgcaagaaaaccctgatctgggggctgagtattttcatcctggcgtcattgggttgcggggccgcgcccactgcgctgctcctcgatatcgcccgcgcggtcaaaggcgtgggcgcggcgctgttgctcacgtccgccctcgcctccatcggccataccttccacgacgaggtggagcgcgccaaggcctgggccttctggggcgcgtgcatgggcgtggcgatgactgccgccccgaccctcggcggcctgatcacccagtacctgggctggcgctggatcttctacctcaacttgccggtagggctggtgctgatgagcctggtcttgcgcgcgattccggaatcccgcgacacccaatccgcaaggctcgacccctggggcagcctggcattcagcgccagcctgctgtgcctgatctgggggctgatcgaagccaatcgcatcggctgggacaacccgttgacctacgcccgcctgatcggcggcgcggtcttgctgggcgtatttgtgctcgtcgaacgggtgcaacggcggcccatggtcgacctgcaactgttccgccacccgcgctttatcggggcgttgctgggaatgtttgcctatgccggctgtgcccaggtgatgatgacgttgttgccgttttacctgcagaacggcctggggttttccgcgatcgcctcgggcctgggcatgctgccgtttgcgctgaccatgctgatttgcccgcgcatcggcgcacgcctggccgcacgctttgcacccgcgacaatgatggccgccgggttgacgctggtgggcagcggtaacctcttgagtgcctgggcagtgaacgccggcggctacctgcccttcgccctggcgattgccgtcaccggcgccggtgccggcttgctcaatggcgatacgcagaaaaacatcatggcctgcgtgccacgggaccgcgcggggatggcgtcgggcatgagcacgaccatgcgcttcagcgcgatcatgctggcgattggggtgtatggggcgttgttgagcagtcatagcgagcagctgttgagcgccaccatcggcgcgcaatggcaggcgcaggtgaacgggattgcttcacgcgtagtggccggggatatgccggcggcgatgggcttgttgccggaatcggcacgggcggtgatacagccgctggcacggcaggcgtttgtgggtgggttcagcggggtgttatgggtgtcggggttgttggggttgcttggagcgttggtggtggggatgttgatgaggaaccccattccagcggtgcaacaggcctcaataaaacctgcgcaccgctgatcagccttaccagaaccgctgctgggtcaaccggctccaccaggtcagcagcacccggtccaccgagccgctggccgccaggcccacgcgctcctgcaggctcttgcgctcggcatagtgcaagtggaacacctcggcggtcttggccttggtggccaggtattcgtcgctggtttgcagctcatcgaccagttgcttgtcgagggctgcaacacccagccacacttctccggtggcgacgtcatcgattgccaactgcgggcgataacgcgacacgaagttcttgaacaactggtgagtgatgtccaggtcttcctggaacttctcgcggcccttctcggtgttttcgccaaacacggtgagcgtgcgcttgtactcgccggcggtcagcacttcgaagtcgatgtcgtgctttttcagcaggcggttgacgttaggcaactgcgccaccaccccaatggagccgaggatggcgaacggcgcgctgatgatcttctcgccgatgcacgccatcatgtagccgccgctggccgcgaccttgtcgatgcacacggtcaacggcacgcccgcctggcggatacgcgccagttgcgacgaggccaggccgtagctgtggaccatgccgccgccgctttcgaggcgcagcaccacttcgtctttcggggtagccaggctcagcaatgcagtgatttcgtggcgcaggctttcggtggccgaggccttgatgtcaccgtcgaagtccagcacgaacacccgtggcttggcctcggccttctgcttgcccttcttcttttcggccttgccttcggacttgcgcaaggccttgagctggtccttgtcgagcagggtcgactccaggcgctcacgcaggcctttgtagaaatcattgagcttgctgacctgcagctggccggcggatttgcgacgccctttactgcgcagcgccgcgaagctgatcaataccaccagaatagcgaccaccagggtgacggtcttcgccagaaagctcgcatattcggccaaaaaatccatgttgctccttacaagtgcagtgcgccgggcgcggattgccccagcataccggcggcaccgcgttcgagccagtgatcaaaccgccagcaacgacaggctccaacgagcttttaaaacaagcgtatgttttttcattgacagctcgcaggcatcctcataacctcgccagactttcaacgtaccgggaaaacggacgtgggcagcatctatctgattcgacatggccaggcctccttcggtgcagacgactatgacgtgctgtcgcccgtcggcgtggagcaggcacaagtgctcggtcgccacctggcggacatgggcctggtgttcgaccgctgcgtggccggcgacctgcgccgccagcagcacaccgccaccgccgccttcgagcagtaccacgccctcgacttgccggtgccggcgctggaaaccgacagcgcgttcaacgaattcgatgccgacgcgatcatccgcgccctgctccccgacctgctcaccaccgaacccgaagccctggagatcctgcgcaatgccgcgcagaaccgcagcgagttccagcgcatcttcgccctgatcatcgagcgctggctggccggcacctatgaccctccggggctcgaaagctggctgggcttcgtggaacgtgtgcaaggcggcctgcaacgcatccttgaagcggcggacaacacccagaagatcgcggtgttcacctccggcggcaccatcaccgccctgctccacctgatcacccggatgcccgccgcgcaggcgttcgaactgaactggcaaattgttaacacctcgctcaaccagctgaaattccgcgggcgcgaggtggcactggcttccttcaacagccatacccacttgcaactgttgaaggcgccgcagctcatcaccttccgatgaactgcggccaaccgtgaccccaaggtcactggactctacccaaaaggatcgaaaccatgactgacgtagccaaagctgtagaagcaatgaaagccaaattcaacccaagtgctgccgaaggcttggacctggtattcggtttccgtatcgatgacaccaagaacttctccctggtcgtcaaagacaagacctgtgaactgcaggaaggcgaaaacccggacgcccaggtgaccctggtcatggacagcgaaaccctggaaggtattgtcgacggctccaccgacggcatgcaggccttcatgggcggcaagctgcgcaccgaaggcgacatgatgctggccatgaagctgagcgagctgttcccttcctgattcacgggcgaccctgaatcccgatcccgccttcacaggcgggatttttatttgggctgcagcaacaacgccaccaacgcactccacccggtttgatgcgaagcccccagcccccgcccggtctcgccatgaaagtactcatggaacagcaccagctcacggttctgcgggtccgcctccaactgcgcatactccaccatcgacggccgcgagccgttttcatccctcaggaacaaccgcgtcaggcgctggctcaggctgtcggccacttcctccagggacgccagataaccgctgcccgccgggtactccaccgagaagttgtcagcgtagtagcggtgaaattcgcgcagcgactcgatcaacatgtagttcaccggcatccacaacggcccgcgccagttggagttgccaccgtacagccgcgagtcggattcacccggctggtaacgcgcactgagggtgttgccattcatcttcaacgccagcggttgctcggcgaatgccttggacaaggagcgcacaccaaacgtcgacaggaactcatgttcatcgagcatgcgccgcaacaggtctttggtccgctcaccgcgcagcagcgccagcaacaggcgattgccctgccccggttcgttccagcgtgaaaccagcttggccaggtccggccgatgtttcatgaaccccagcagacgctcgcgcaagccctccaggccctcatgttcgtgctgctccagtaccagcacggcaaacagcggcatcaggccaaccatcgaacgcaggcgcaccggctcgttctggccatcggggcggtgcagtacgtcgtagaagaacaggtcctgctcatcccacaggccttcggcgctgtcgtcgacacggttgatggcgccggcgatgtacaggaagtgctcgaagaacttcaccgagatgtcgacatacaccgcattgcgcttggccagctccaggccgatgcgcatcaggtccagcgcataggccgcgacccatgccgtaccgtcggcctgatccagctgataccccggcggcagtgcagcggagcggtcgaacaaggcgatattgtccagccccaggaaaccaccctggaacaggttgcgcccctcggcgtccttgcggttgacccaccaggaaaaattcagcagcagcttgtggaaaatccgctcgaggaaatccatatcgcctacgccgttgagcgccttgtcctgctgatacacccgccaactggcccaggcatgcaccggcgggttggcatcgtcaaaccgccattcgtaggccggcaattggccgttggggtgcatgaagcggtccttcaccagcagcaacagctgttgcttggcataccccggatcgatcagcgccatggccaccgcctggaagccctggtcccacgaggcataccacgggtattcccacgtgtcgggcatcgagagaatgtcgaagttggacaggtggcgccaatgggtattgcggatatgcaggcgctcggggggcggcgcgggttgtgcggggtcgccgtcgagccattggttgacgtcgaaatagtacagctgcttggaccacagcaacccggccagtgcctgacgctgcacattgcgcgcatcgtcgtcggccatgccacgttgcagggcggcgtagaagtcatccgcttcctggcggcgttgttcgaacagcttgcgcgcgttgacctgtggcgcgtcgacaggagcaaagcgcaggtagagacttttgctttccaggccggccagttcgacgatgaaacgcgccgcgactttggtgccgctgtcacgccgaattgccgattgaacaccctcgaccacgaaatcgttgatcccgtccttgaacggccccggtgcaggctgcccatccagcctggggtagttggtttcgttctcgcagaacagccactccagcccgtcctggccccaggcgctgagatgacggtccggcagttccggatggcgtgccagcacctgcgccccgtccaacaccagctgcggcttggtcgcgtcaaaggtccagctccagtcattgcgcgcccacagttgcggcaacacctgcagccgcgtcggctggtccgagcggttgtgcacggtgacgcgcatgaagatatcgtcgggttggtgcttggcgtattcgacgctgacatcgcagtagcggttgtcttcgaacacgccggtgtcgaggatctcgtactcggcatcggccaggccacgccgtgcgttttcgctgatcaggtcggcgtagggaaaggcgacatgggggtatttgtagagcatgcgcatgtaggcatggctcggtacgccgtcgacgaaaaagtacagttccttgacgtcttcaccgtgattgccctcggcgttgtcgaggccgaacaggcgctccttgaggatcgcgtcgcgctcgttccacagggccaggcccaggcaccagcgttgcgccttgtcgctgaaaccggccaggccatcctcgccccagcggtaggcgcggctgcgtgcatgttcatgggggaaataggcccaggcgtcgccgtcggcgctgtagtcttcgcgcaccgtgccccattggcgttcgctcagataggggccccactcgcgccaacgctcggcatcctgctgcgccaggcgctggccttcggttgtatcaagcattcgggtgtcgggtgtggccgtcatcgggtcctccatcgcctaccaggtgagaggcagtgtagagcccaatgacgcccgggtgcacatgaagacttagaagatggcgtaggtgtagttgaagatcaggcgggtctggtcctggtcggcagtaccggtgttcttgccgtgataggtgccggtacggaacgtggtaccgaagcctttcaggggacctgcctgcaccacgtagtccaggcggaagtcggcttcgttctctttctggtccgggccaccggcgaccttcgacttgatgtccgaaccgtccaggtaggccacggatgccttcagcccaggcacgtaggccttgaagtcataggtgtactggccaaagttgacctgctcgccggcacgggagaactggccgaccacggcgtcggtgaacagatagaagtcgctgccgccagcgccttgggcgtgcgggtcggcgaggctgccctggttgacccagacgaaaccgccatcgtcacccacgccaatgtggccgagcatcaagctgctgccgcccagttggtaggtgaaggccgcactgtaggttttgttgtcgacttcgccggcgtgtttggcgtagccaccgttgttgttgaattggtagccgctctcgccgttcttgccgtcgctgcggctgtcgaagtagcgcaggtcggtcttgaacgactggtcattgcccagcggcagggtatggaccaggccgacgtagttctgtttgtagaagtcttgcagttgggcgtagtagtactgcaacgtcaggtttttcgcgatcacgttgtcggaagacccaaacggcttgtagtccacgccgccgaacttgaagctgtcgctgtcgcgagtaccaccggccacgctcaggcctgtggagttgctggaggcacggccttcaacgcggttcagctcaccaccggtgaaggtgacgttgggaatgtcgttggaggtcaggatgccgccatcaaaggtctgcggtgctacgcggctgtcgttggacaccaggatcggcaggaccggcgccaggccaccaccgacgtgcaactcggtctgggaaatacggaacttcacattgccagcggcgcgcccgaaggaatcggccggttcagtgccgttgttcttggtcgggaagaaactattgccgttacccgccaggcccgcgcccgccgtgtggccgtcgccaccgtccaggcgcagcgcgccgaaggccatgacgtcaaaacccaggccaacggtgccctgggtaaaaccggatttgtagtcaaaccgcagcgctgtggcggtttcgcgcaaatcgttgttggtccccgagcggttgtccgcgctgtagtacatggtccgcgaactgacggacgcatggctgtcttcaaggaagccgctgtgaccgttgccagtgcccagcgagccgagcccgaaatcatcggcgtaagcctgttgtgcaagaacggcggcggtgatcgacaacgccagtgtagaaattttcattaacgacggcccctaaacatatttttatgtgtgcgatgtgcgtaacggcgttttcatccttgcaaacgtgacgattctttcacgccggccggggcggacttcgtgaagaattagttaggaaaatcgcccgaaaatgaaatttcacgcgggctgatttttgtcatcttcacgtcatctcattcatttgcagaatgaagtcctgaggaatcttcgtttgcaaggcgacgttgcgctcaacaaaatccagcaaaaggccaccatcctcgcccccgccatcaggaatttttctatgcccagcaccgcacaggtcagccccgacgagatccgcaagggcttttccaaggccatgtccgacatgtaccgagatgaagttccgttgtatggcgcgctgatggagctggtggccgaaaccaatgcccacgtgctcgacacccaaccgcaactggcgcaacagctgcaacgcaccggcgaaatccagcgcctggacagggaacgccacggcgcgatccgcctgggcaccgccaccgagctggccaccatccgccgcctgttcgcggtgatgggcatgcagccggtgggctactacgacctgaccccggccggcgtgcccgtgcactccaccgcgtttcgcgccgtgcatgaacaggcgctgcagaccagcccgtttcgcgtgttcacctcattgctgcgcccggagctgatcgaaaaccccgacctgcgcgccttcgccgagacggccctggccaagcgctcgatctttacccccggcgccctggcgctgattgaacaagccgaaaaacatggcggcctcaacgcccaggatgccgacgagttcatccgccaggccctggaaaccttccgctggcatcacaccgccaccgtcaccgccgcccagtaccagcaactgagcgaccagcaccgcctgatcgccgacgtggtcgccttcaaagggccgcacatcaaccacctgaccccgcgcaccctggacatcgaccaggtccaggccgccatgcccggcaaaggcatcacgcccaaggccgtgatcgaaggcccaccgcgccgccactgcccgatcctgctgcgccagaccagcttcaaggccctggatgaacccatcgccttcaccgacgcccaaggcagccacagcgcacgcttcggcgaaatcgaacaacgcggcgtggcgttgacgcccaaaggccgcgcgctctacgaccaactgctgaacgccgcccgtgacgcactcggcgccttccccaacgagggcaacgctgcgcgctatgtcgaattgatggaggaacacttccaggccttcccggacaaccacgcccaaatgcgtgaccagggcctggcctactaccgctacttccccacccagcaaggcttggcggcacgcggcagcgccgatcaaccacgcaccctggaggcactgatcgccgccggccacatcgacgtggaaccgttggtgtatgaagattttctgccggtaagcgcggcggggattttccagtcgaacctgggggatacggcgcagagtcactacgcagccaactcgaaccaggccgagttcgaacaggcactgggccagcgaacgattgatgaattgaaactgtatggcgagacgcagcagcgctccatcgatgaatgcaccgaggcgctgctggcatgaaatgaagtacccacccggctcaccagcgcaatccttgcgccgcaacagtccccagagccgggtgggcggtgggcatcataggcagtgagtgggatgatgtctttcagtcaattctgaaaaaatgtgaacggggcgaacgtgcctgttcactgcgcaataaaacaacgatgctgcagtaggttcccctgcgtgcggcagctatgaccaagccttcattttcctatctatgggcggcgtccagcggagaatcccgtattcccaggcagccttattcaatgcgtttctgcccctcacatagcttgtgattgccgtgtccgtgtacaagcaaccgatcttgatgaatgtgttgcccctgcactcattcgtcgtgagcgtgctgatagcactcatgatctatgaactggcgactcaaaaaaatagtcgcaaggtaacgtgtgtactctcaacctccagacgtaagcccaactgtgcttatcacgcgtgcaatacaaaaatacactgcaaagaacaacccacattaaacccaacagaaaaatactacacgcatttaggaagtcctacatttgctcaatgctggcaacatggcttttactgagtgccattcaggaacgatcagcctccttcccgcccccccaaaacagacactcaacaagcatgcttaaacctatcaaaaacaagaacgacaacttatattacgctttgtctgtcttcatgaatctggacgtccagagaagcttatttgtactttacctactgcaactcggcatcacccagggagaggtaggcattctacagtcgttcttgtttttttcttcagtcgcgctggaaatcccctctggtttactcgcagatcgatatggtcgcaagtgcacgcttatcatcagctttttaggcttgtgtataagtggaattggatttttgctattttcatcttttgttcccttcgcaatcatattctgcctattcggtgccagcattgccatggggtctggttcagacagagcattactgtatgacaacttactggcagaacatcgggctgatgagtaccctaaaatattgtcacgcgcccgtgctattggtgcgatatcgctgagtttgtccatgcttcttggcggtgtcatacaagacaccttgtcgtggaacggagtctatattttttttgcggcatcaaaactcatcggcgcgatcattgtagtattcaactccgaaatcaagcttccacctatttcactaaaccccaacaacgcaaatgaattaaatacgacaaccgcagagggaagctttactttactcatcaaatttttcagctccaacagaggtgcttttctgatacctctctttgttggatatgctctatttgaactctcaaccattcctcttttcatctacggccagccattcttctcccagcagggtctagaaatacctattattgccggcatttacgccacagttgaaatcatatcggctgccatgtttatggttgcaggatatatttgctccagattcacgcttggggtgatagccgtcaccaccaccctcattgtcaccgcactgctcttcaccctatctttgaataccggaacactctcttcagtcgcagtatttattttaatcatgtcactccccgctatctatgaaactgcctacgagacctacatcaatgaaaacatagagtcacgcattcgagcctcctgcctctccgtcgccaatctagtcaattcgatcatcatcggtatctcctacactgtcttcggcgggctgctggatagatatggtttctcgtcgacgttgattgttgttgcaggcgtctgttttatgggtctcttttttgcaagtactaccttactgataagtgggcaacaacgtcgtaaaaagagcaaaaagcttgaatcaatccggtttactgaagatgcgccgtgacaggcccaaagtcgggtggataaatatgtcgataaacctgtaggagcaagcttgctcgcgaagaacccgagaacgccgcgtccactcagggcgccggcgtcatcgttggcgtttttcgcgagcaagctcgctcctacaggaggctcggttgtgatcagcccaacttcgccacgatgtcgtctttgatcaacaagcgtttcttcttcagcttctccacatcctcatcgctggcacttgccgattccgctttcagcaccgccttgtcagcgtcgtcgtactgcgtgagcagcgagtccaggcgtttgtcgctcgccctgcgttcgtgaatgacttccttgctcaccttcaagtcctgatacaagtcgtgtttcactggcatggcgtacctccgcatgttgatcaatggcttacgccctagaagctagaccattgcgaggggtcttgtcatgcgcggggtcaatacagccccgttcgtcgcggcgcgggtgtttggatcaaacctttgcggcgtcctgccctccactctagatagccacccgagggagaccggtttcatgacgcacgctgccaccgctgtcgacacccaatgcatcaacacgatccgcaccctggccatggatgccgtgcagaaggccaattccggccatccgggcacgcccatgggcctggcgccggtgggttataccctgtggagtcgcttcctgcgttaccacccgcagcatccggactggcccaaccgtgaccgctttgtgctgtcggtggggcacgcatcgatgctgctgtattcgctattgcacctggccggtgtggtggagatcgatgccgatggcaagcgcaccggccaggccgccgtcagcctggacgatatccagcagtttcgccaagcgggctccaaaacccccggccaccccgaataccgcatgaccactggggtggagaccaccaccggcccgctgggtcagggttgcgccaacagcgtcggcatggcgatggctgagcgctggctggccaagcgcttcaatcgtgaaggaaacaccctgttcgattacaacgtctacaccctgtgcggcgacggcgacatgatggagggcatcagcagcgaagcggcgtcgatggccgggcatctgaagttgtcgaacctgtgctggatctacgacaacaacaccatcagcatcgaggggcacaccgagctggcgttcagcgaggacgtgatcaagcgcttccaggcctacggctggcacaccttgcacgtgaccgacgccaacgatttgcaggccctgggcacggcgctggaaaccttccacagcaacaccggcgcgccgaccctgattgtggtcgacagcgtgatcggctacggttcgccgcacaaacacaacaccgttgccgcccatggcgagccactgggcgacgaagaaatccgcttgaccaaggcggcctacggctggccgcaggactcgagtttcctggtgcccgacgaagcccgcaatgtgttgcgcgatgcactgctggaacgcagccaacccttgtacgacgcctggaaccagcgcctgtcgcagcttgagcaatacgaaccggaacgggctgacgaactgcgccggatgcgcgccggagaaatgcccgagcactggcaggacgatttgcccgacttcaaccccgacgccaagggcgtggccagccgcgccgccggaggtgaagtgctgaatgcctttgcccgacaaatcccctggctgctgggcggctcggccgacctgtcaccgtcgaccaagaccaacctcacctttgacggtgccgggcgtttcagtgccgacgactacagcgggcgcaacctgcacttcggcattcgtgaacatgccatgggcgccatcgccaatggcatggcgctctcctacctgcggccgtacacctcgaccttcctggtgttcagcgactacatgaagccgccgatccgcctggcggcaatcatggagctcccggtggtctttgtgtttacccatgactcgattggcgtgggtgaagatgggccgacccaccagccgatcgagcacctgacccagttgcgcgcaacgccggggctgctgaccttgcgccccggtgacgcgaatgaaacccgcgaactgtggaaggtggcgctggcacagacccatcggccgagctgcgtggtgctgtcgcgccaaccgctgccgacgctggatcgtacgcagtacgcgccggcatccggggccgccaggggcgcttacgtgctggcaagtgcgggtgcgccccaggtgattctgctggccacaggcagcgaagtcagcctggcggtggcggcgtacgagcagttgaaagaagaagggattgccgcgcaggtggtgtccatgcccagttgggagttgtttgaggaccaggaccagacgtaccgcgacagcgtgttgccgccggcggtgaaagctcgggtcgtcgtggagcaggcaggccccctcggctgggaccggtatgtggggcagaccggcgccaaggtggtgatgaacagctttggtgcgtcggcgccgttggcacagttgcaggagaggttcgggtttaccgtggagaatgtggtgaagcaggcgaaagcgcagatccaactgactcaacagtgatcgaaatgtgggaggggcggtgcgacggttccacttgcccccgatagcggtgtgtcagtcgcatatcagttgactgacacactgtcatcgggggcaagccccctcccacaagttctcatccgcttttagttcagttctttggccaggaatggcgcagtccggctagtcttgcttttggcaaccttctgcggcgtcccactggccaccaccttccctcccagatcccccgcccccggcccgatatcgatcacccagtcactctgcgccaccacgcgcatttcatgctccaccacgaccaccgtatgccccgcgtccaccagttggttcaactggctgagcaggcggtccacatcccgtggatgcagcccggtggtgggttcgtccagcacatacagggtggcgccccgcgcattgcgttgcagctcggtcgccagtttgatgcgctgtgcttcgccaccggacaactcggtcgccggttgccccaggcgcaggtagcccaggccgatatcccgcagcacctgcagcgaacgcaacaccccaggctgttcggcaaacacctccaccgcctgctccaccgtcagccccagcacctcggcgatgctcaagccttgccatttgatcgccagggtctcggggttgtagcgcgcgccgtggcagatcgggcatggcgcgtacacgctgggcatgaacagcaattcaacgctgacaaagccctcgccttcacaattcgggcaacggcccttggcgacgttgaaggagaactgcccggcatcgtagtgacgcttcttcgccgccggggtggccgcgaacagcttgcgcacgttgtcgaacagcccggtgtaggtcgccaggttggagcgcggggtgcggccgatgggtttctggtcgacctgcaccaggcggcggatgtgctccagcccggcgcggatgtggcccccgctggtttgcggggcgtcgtcttccaggcttggttcttcgtcgttttccatcacacgcccaaggccggcgcccaccagctccagcagtgcctggctgaccaggctggacttgcccgagccagaaatcccggtgaccgccgtgaagcagcccaatgggaaatccacgtcaaggcccttgagattattgcgcgtcacaccttccagttgcagccagccggtggcttcacggcgcacctgagtcgacacgcgcttttccgcgaacaggtactcacgggtctgcgacgccgccacctgcgccagccccgccggcgggccgctgtacagcacctgcccaccctgttcaccggccgccgggccgacgtcgatcagccagtcggcgcggcgcatggtttccaggtcatgctccaccacaaacaatgaattgccggccgccttcaagcggtcgagggcagtgaacaacgcttcgccgtccgccgggtgcaggcccgccgagggctcgtccagcacgtagatcacaccaaacaactgcgagcccaattgcgttgccaggcgcagtcgctgcaactcgccggaggacaaggtcggcgtgctgcgctccagggacaggtagcccaggcccaattcggtcaaggtactgacccgctccagcaagtcctgggcgatgcgctgcgcggccaggcgcttctccaccgacagcttcatcttgtcctgccccgccgccaccgggcgcagcaactcggccaactgcgtcaacgacagttgcgacaactcaccgatgtccaccccggcaaacttcaccgacagcgccgcctgggtcaggcgcttgccgtcgcacagcgggcaggcgctgccctgcatgaactgcgacacgcgctttttcatcagcgcactctgggtatgggtgaacgtgtgcaggatgtagcgccgtgcgccgatgaaggtgccctggtagctcggctccagtttgcgcttcaacgcatcgcgggtctgttccggggtgaagccggcgtacaccgggacggtgggggtctcttcggtaaacaggatccagtcgcgctgctttttcggcaggtcgcgccaggggatgtccacgtcatagcccagggtcaccaggatgtcgcgctggttctgcccctgccacgccaacggccaggacgccaccgcacgctggcgaatggtcagggaaggatcgggcaccatcagcgcctcggtcacttcatacacacgccccaggccatggcactgcgggcacgcgccctggggcaggttcggcgaaaagtcttcggcgtacagcatcgcctgccccttcggataactgccggcgcgggagtacagcatgcggatcaaactcgacaacgtggtcacgctgcccaccgacgagcgcgcactcggcgtgccgcgctgctgttgcagggccacggcgggcggcaggccttcgatgctgtccacgtccggcacgccgacctggtcgatcaaccgccgcgcatagggcgccaccgactcgaaatagcggcgctgggcctcggcatacaccgtggaaaacgccagggacgatttgccggaacccgacaccccggtgaacaccaccagggcatcgcggggaatatccacgtcgacgttgcgcaggttgtgttcgcgggcgccgcgcacgcggacaaagccggcgggttgggcagtgatcggaggaatattgcgctgtgaagtcatggacaaccttgtcgggcggtgagcacgctgcgcacccgttgcgtcagcgcttcggggctgtagggtttgctcagcagatgaatatcggggctcagcaagtgattgctggagagaatgtcacgggtgtggccggacgtgaacagcaccggcaccgcaggcgtctgctggcgggcccagtcggccaggtcggtgcttttgacgcggccgggcatgaccacatcggtgaagatcaggtccggtggcgagcctgcctgcagtttcgacatggcctggtcaccgtcttcggcggtaagtacggtgtagccggactgttcgagcagctccacgacagtcaggcgcacaccttcattgtcctcgaccaccaggatggtttcctgtccgccgctgtgctgcacctggtccatatgcacatcgaggctttccggttccaggctgtgggggaaatacatctgcaccaccgagcccttgccctcctcgctccacatttccacatgcccgccactctggcgcacaaagccgaacaccatgctcaggcccaggccggtgccatggccttcacgcttggtggtgaagaagggttcgaaggcgcgcttgagggtggtctcggacatgccgacgccggtatcggccacctccaggcgcacatactcgccgggcttgatgcttttgcccgcgcaatcgtccgggttgaggatgatgttttcgccggagatgcggatcaccccctcgcccttcatggcgtcgcgggcattgatcgccaggttgagcagcgcgttttccagctggttgcggtcgacgttgataaaccaggcatcctggggcatctgcacatcaatgtggatggtctcgcccagcgcccgttgcagcaactcgccaagcccggcgtaaatgcgttgcgggttatacaccgccggcgacagcggttgacgccgggcgaacgccagcagttgcgacgacagcttggccccacgctccaccgccgcaatggcggcggtgacacgccgctgcacctgggcgttgttcggttcctggcgggccagcaggtgcaggttgccggcgatcacttgcagcaggttattgaagtcgtgggccacgccgccggtgaggccgccgatggcttcgagtttctgcgactggcgcaactggtcctcggccgcagagcgcgcctgcacttcggcggccacccgttgttcgaggttgtgcgtgagttcccggcgtacttgttcggatttcaccagctcggtggtctccaccacaatcgccagcacgccggccggttgttgatcgtcgccggccaccgggctgtagtagaggtccagccacacggtttccggctggccgttgcgcaacagcaccaggtccttgttattgaatgacagggtgccgccggccaggcaggtgtccatcacatgccggttgaactcggccacttccggccaacccaactccaccggcgtgcccagcaggtacggatggcgcccgccggcaaatgccgagtagctgtcgttatagatcatgtacccccattgtccccagagcatcaccatgggcacgggtgaagccagcatcatctgcacggtacacgccaggctggtggaccagcggtcgatggggccaaggtcggtgctcgaccaatcgaatgcgcggatccgctgggccatttcaccggcccagccttcacagccgtgagggttggataagaattgcatggttggctctgtgcgcaaaaagagaacgtcggcaagttttggagcgctgtagacccggatgggttcaacccatctgcatcagaggtcattacagcagaaaccacgggggctcagtgaaaatcccgactgcgcacattgatcccttccagcaacggcgtcaggtcggtcaggcgcccggcgatcaagtgccgcacctcgcccaccgcttcccagcgcccgtccaccttcaatagccgcgaacccaccagggcctggcgttgacgctcggccaggtcgcgccagaccaccacattaaggttgccgaattcatcttccagggtgacaaaggtcaccccactggccgtgcccgggcgctgccgaccggttaccagccctgcaacgctgacattgcgtccatgttccaccgccatcagttcatgggagctgcggcagcggcgcttgcgcaattcatcccgcagcaacgccagggggtgcggcccaagggtcgtgcccacggtggcatagtcggcctgcaggtcctcgcccacgctcggtgccggcaactcgaccagcgcttcatccgggctcggcaggccggcaaacagccccagttgcttgtgcaccccggccaccgcccagcgcgccgtgtgccggttgtcggccagggcgcgcaaggccccggcatccgcgagcaaggcctgggcacgcgcatccagcccggcgcgctcgtcgaggtcggcaatgttgctgaacgctcgacgcaggcgcgcggcttcgatgcgccgcccatcttcttcgcgaaacccggagatcatgcgcaagcccatgcgaatcgccggttgtgcaccatcgatgggctccaggctgcaatcccaatcgctggcctgcacatccaccggccggatctgcaagcgatggcgccgtgcatcctgcaggatctggtccgggctgtagaagcccatgggccaactgttgatcagcgcacaggcaaacgccgccggttcatggcacttgagccagcaactggcgtaggtcagcaaggcgaaactggccgcgtgggactcggggaagccatagctgccaaagcctttgatctgctcgaagatctgcgcggcaaaggcttcggtgtaaccgtttttcagcatgccggtgcgcaggcgctgctggtgcggctccaggccgccgtggcgtttccaggcggccatggagcggcgcaactggtcggcctcgccggggctgtagtcggcggcgaccatggcgatctgcatcacttgctcttggaacagcggaatgcccagggtgcgttccagaacggttttaagctccggcgaaggataggtttcgggttcttccttgttccgccgccgcaggtacgggtgcaccatgccgccctggatcggccccggtcgcacgatggccacctcgatcaccaggtcatagaatttctgcggcctgagccttggcaacatcgacatctgcgcccgcgattcgatctggaacacgccgatggtgtcggccttgctgatcatcgcgtaggtggccgggtcttccttggggatcgtcgccaaggccaggtcgcggttgcggtggcggcgcagtaagtcgaagcaacgccggattgcactgagcatgcccaaggccaggatatccaccttgagcaagcccacggcgtcgaggtcgtccttgtcccactggatgatggtgcgctcggccatggcggcgttttccaccggcaccagggtgtccagcgggtattcggaaatcacgaagccgccagggtgctgggacaggtgccgagggaagccgatcaattgctgggtgagcgtgagcacccggcgcaacagcgggctgtcgggatcgaagccgccttcgcgcaggcgctccagcggcggggcatcgtcgctccaacgcccgcagcagtcggccagggcgttgatctggtccggcggcagcccgagggccttggccacatcgcgtaccgcgccggcggcgtggtaactgctgaccaccgccgtcagcgccgcgcgggtgcggccgtagcgctggaacacgtactgcagcacttcttcgcggcgctcatgttcgaagtccacgtcgatgtccggcggctcgttgcgctccctggacaggaagcgctcgaacaacaggctcgtcaggctcgggtcgatctcggtgatacccaaggcaaagcacaccgccgagttggccgccgaaccgcggccctggcacaggatcgaacggctgcgggcgaactgcacaatgtcatgcaccgtaaggaagtagctttcgtagcccagctcgctgatgagcttcagttcggtgttgatctgctgcaaggtcttggcgtcgacaccctgcggccagcgttgggcgatgcccgcttcggtcacggtgcgaagccaggattcggcgtcgtggccgctgggcaccagctcacgcgggtagtgatagcgcaactggctgaggtcgaaggtgcaacgccgggcaatcgcctgggtttcatcgagcaaggcgtgcgggtacagcgcggccagggcatcaaggctgcgcaggtgccgctcgccattggggtgcaggcgcgtgccggcttcggccaccggcacgtgatgacggatagcggtcatggtgtcttgcaaggcacggcggccacgcgcatgcatgtgcacatcgccacaggccaccgccgggatgtgcaggctggcggccaggctcaagcgttgttccaggtgacgcgcatcgtcctggccgcagtgcaggtgcacggccagccacaggcgcccggcgaaggtgcggcgcagccactggatcgaggcctgggtgtcgccgtcctcggcgacccacagtgccagcaggccgggcagcggttgttcgaagtcctcgcgcaacaggcgatagtggcccttttccgcgcgccgccgggccacggtgatcaagcggcacaggtgctggtagccgctgaggtcttccaccagcagcaccagcttcgggccgttctcgatgcgcacctcgctgccgataatcagcggcagttccaccgccttcgccgcctgccaagcccgcacgatgcccgccagggtgcattcgtcagtgatcgccagggcgctgtagccttggcgcttggcccgctcgaacagctccagcgcactcgacgcaccgcgctggaagctgaagttggacaggcagtgcagctcggcgtaattcatgcaaaccagccttgcagccacaacccatcgctttgcccgacgttacgaaaggcccagccttgctggccggcgcgggtctggatcaggtagtagtcgcggcggatatcggcgccgtcccaccagccggactcgatgcgctccggccccatgaggatgtgcacaccgtgctcggccaagagggtgggttcgctcagcaaccaaccggggcgttgcaccttgtgcaaggtcgggcatgggcttttatcggtcgctgtttgccaggcgcattcggggcggtggtcggcgtggaagcgcaagccctgcacggcctcatcgcccaggcgtgcacgcaggcgttcgcgcaactgttcccacggcaaggtctgttgcgggcggtcgtcgaacaggtcctggcgctgcggcacgaacaccggcaaatcctgggcgaccaggcgaaagccgcgtaccggtgaggtgacctgtacctgctccaggcgaccccgggccaattcaaacagcatcgccggttcacgctcggcgctgagcaggccgaccttgatcagcgtgtccggcgcctgggcgtgttccaggtgcaagtcaaaacgctgtacgccactgtcacggccacacaggaaggccgacagatcgcccgtcaggcgtcgcaaaggaaacagcagcgcctgatgggactgcacgtcgaaattcagctcgatgcgcacatcgaaccggtccggaggctgatagaacgccaaggccaatgggcgctggccggtcaacgcatccaagtgcttgagcaggccggcatcaaaacgtcgcgccaaggtgtgccgaggcagcgcctgcacctgggccaggcggcgcaggcccatgcgcgacaacgctgtggcggcctgcgggtcgaggccggcgcggtcgatgggcagcggcgccagggcctgcagcaagccgtcatcctgcaccgccaaaccatcgtagatattcgccagcacccgcgccgccgccgggttgggcgccgcgacgatacggtgacgaaagcccaattcggtcagctccttgcgcaagcgtgcttcaaaccgcggccacggcccgaacaagcccaggctcgattcgatttcaaacaacaaggcacgcgggtaatacaggctgacctgggaactgaactggtaggcccaggcagccaggaactgttggtggcgctcgatctcggcggggtcgtattcgacgctggcaaaggtcttggccagggcatgcgccgccgtcagggattggcccgggcgcaggcccagggcgtgggcggcgtcattgacggtttgcagcacacgccgctgtggcgtgccggccagcagggccaggggttgctccggctcgggatgcacacgcagcactccgtccagcgccaattgcgggaagacaatacacacccagcgcatgacaacctcagtgccccgccagggcaatcggcgccggatgggccaagccgccccggcacttgagcacccgtacctgcgcgggcctggcctcgacggccaggcgtagcgcggcgggcgatgagttgaccgactcactcaaggcgcgccaggcaaacgccagggtctgcccggtttccgccgccacttgcaggcgccgcagcgcccggtcatcggccttgcgcggccagcacagcaccgcgccgcaactgccggaacgcaggcattgctccaccgcccacagggcgtcgcgttcctcggcctggatcaccgagagcaggcgcaggtccactccagcgttctgccaggcatgggggtacggcgtgtacggcggcgccaccaacacaatgcgctcccccgccttcgacaaacgcgccagggtcggcagcaccagttgcaactcgcccacaccttccttggccatgaggatttcactcaatgccgcctccggccagccgcccgtgggcagcaccgcgtccaacgccgccagcccggtagggtgcacgctggacggcggcgcggcaggccggcccttccagacacgcccgccattaaacagcgtgtccagcgcaaccacggcgcccatcagccttgcctcaccaaaccgcagaacaccccttcgatggccaggtcctggtcaggccccaccacgatgggttgatacgcggggttgcgcggcagcagacgcacgctgtcgccactgcgctcgaaacgcttgatggtcacttcgccgtccaggcgcgccaccacgatctgcccgttcaaggcctcggcactgcggcgtacgccgaccagatcaccgtcgagaataccgtcctcaatcatcgaatcgccctgcacgcgcaacaggtagtccggggttttcgcgaaggtcgacgggtccagttgcaggcgactgtgcacttcagcatcggcgccgataggcaaacctgcggccacgcgaccgagcaccggcacatccagccattccgggcgcaccggctggttgagcaggcgaatgccacgcgcctggtgggggttgacctcgataaacccggcttcggtcagcgccagcacatgcttgcgcgccacgctgcgcgaggcaaaaccgaacgcctcggcgatctcggcgaggctcgggggctggccttgctgcgcgatgcggtcgcggataaaggtcaggatggcggtacggcggggggtgagagtcgtcatggagtacatttgtactcctgtgggaaatttctgacaatagccgctagtcgcgcgatagcggacaagcgttatcgaaccgtcccacataaccgccggataagctctactcccctgccctgcaaacgcccgcaaagtccgtcgcctgactacacagtgcgagggattgcagatggcgttatgggtttgggctccggtggatggggctgtttcatgatcgaagtgaccagccaaaccattggctatttggtactggccaccctggattcaaagacgcgagacgtcgaatccgttatcagcgacttcaagcgctgcctcaatcactacgacgcctgggcttcgagctttttcagcttttcggcgctggatatcgaacaggtcttcaaggtgggggatgaagtggcgctggtcgcgccgatcaaccgctccctgtttcccagcacaaccaccgcaacctgccgggcagacggcacgctgaccctggtgcatatgttccagagttctcgattcgtacccatcggcgatacgcccgtgatggtgcagcgcatcgatccggacggtggcccgctcggggagcccctccataaaaccatcggacccagcggcattctcgaaatcaaggaatgtgatcgcaaccagcagtaccgggtcagtttctaccccaacgtttccaaggcgcacttcaaggcgctgtacgcctcttaccagtcggttatcgaaccgctggaaggctggttgcgccgtgagtggaccaccaccttcgccgccttatggatgggttattccgaagccaactttctcaagcgctacctctcgctgcaccaagcctacgcacgcgggttcagcggggcgttgtattcactttgggacaacatcaagcagatgcttcagtggtttctggacccactgaagcatgccgaaaagctactgcattacctgagccaggaagaattcgaaaagctcttgaagcttggcaccgaaagcatcgcaaagggcctgctggtgctgagtgatgagccgttgctgttcatttatctgtcggcaatggtcagttggatgcggatgttaccgccgccctatatgaatgagctgctgggggaaatcagcgctgaagtattgatcaatttgctgctgtgccttgccacggccggtatggggatggcggtacgcatcagtacgaaggtgctgggcagcatcaagtctcaacgtgtgcgcacatggcttgagcacatggctgggcagttcgggaaatttcgtgcggatgatcacacgcaggtggccaagccgatattgctcagtagccaggcgacgacgatcaagacgattccggatgcgcccttgaaggctggggatcaggtggttgccaacgcggtgccggtggttcgggataaggccacgcagcggacggtgctggtgcggcaggagcctgtggatgatgtgccggcttctgctcgaaacccgaatggggatgcggcggcgcctgcggacaagaccgccactaacggctgcccggtgtcgatggtcaccggcgaggaattgctgacccttaccgatgggacgctggacgggatcttgccgtttgagtggactcgcttgtaccgcaccagtgcggtggaagtggattgcgggctggggtttggctggagtcactcgctggcgcatcggctggtggttgagggtgattcggtggtttggaccgatcatgagaatcggtcgaccaccctgcccttgcctactgcctctcgacctgcgatcaccaatagcctggccgaagcggcgatctatttgggtgctgcgcccgatgaactggtgctggcgcaggcgtcacgtttctaccacttccgcgacggtgtgctgacggcgatcagcgatgcgtatgacaaccggctgcgtatcactcgggattttctggggcgtgttgagcgggtggataacggcgtcgggcgctcgttgtggttgcgctatgtgtcggaccggattgtggcggtggattaccagattcatcgcgtcgtggatgacgggccgtttgtttgggtgacggagcagaccgttgtttcctacgcctatgacgacttgggacgactggtttcagcgaccaatgccgtcggtgaaagcgaggtttatcggtacgacgaacagcacatcattcttgagcgcggcttggccggtggggcgagctttttctgggaatgggaacggtctggcaagacggcgcggagtgtgcggcattgggcgagtttctcgcagatggacacgcgctatgcctgggatgacaacggccaggtcacggtgtttaacgccgatggcagccaggaagtctacgtgcatgaccagcgggcgcggctggtgcagcgggtcgatccagacggtgccgagcatttcaaatcctacgatgaccaaggccggctgaccgttgagcaggatccgctgggggcgatcaccgcgtatcagtacgacgaagccgggcgcttggtggcggtgtttccgggggacgatgagccgacgacctacgagcatgacaacgggttcgtacgggttgtgcggcgtggtaaagcggtttggaagtatgagcgcaatgaccagggcgatgtaacgcgcaagatcgatccagacggtcacgttaccgattacacctacaacaaatatggccaactgattggggtttggtacccggatcacagctgtcagcggctggtatggaacgagcacgggcagttgcttgaggagcagttgcccaatggtgggatcaagcgctatcgctatgacgatctcgggcggcagattgcacgggaagatgaacacggcgcactgacccagtatcagtgggacagcgtgggtcaactgattcgcgttgtgctgccaggcggcgagttcagggaatacagctacaacccctacggaaaaatcaccgccgagcgcgatgaactcgggcacgtcacccgctacgaatacgccgacggcctgcacctgatcagccgccgtatcaatgccgatggcagccaggtcaactaccgctacgacaacgcgcggttactgctgaccgagatcgaaaacgaggtgggcgagacctaccggctccagtaccacagcaacggcctgatccagcaggaaaccgggtttgacggtcagcgcaccgcttacgtttacgaccttaatggcaacctttcggaaaagaccgaacacggcgatgacggcagtcagttggttacccgctaccagcgcgattacgccggacgcctcgtcagaaaaaccctgcccgacggtggcaaggttgattacacctacgaccgccagggcaatctattaggcgtcgaagacggccactggtccctggcctacgagtacgacagccaaaaccgcctcaccgccgaacaccaaggctggggcacgctgcgctacgcctacgacgcctgcggccgattgcaaaacctgcgcctgccggacaacaaccgcctcaccctcaatcacgacaaaggcggccacctcgccaccgtcgaactgaacggcgttgtacttacctcacacctgttcaaggcaggccgcgaacagcaacgccaacaaggccaactgctcagccactaccaacacgaccaccaaggccgcctgttcaaccagagcatcgttgatgccgaaggcccggtctaccgccgtcactacgactacgacaaatccggcaacctcacccgcctgctcgacacccgcaaaggcgaacaccgctaccactacgacccactcaaccgcctcacccgcgccgaccactcgcaagacgaacaggaacgcttcggccacgacccggccggcaacctgctcatgcacaaccgccccggccccgacatcgtcgccggcaatcgcctgatgatccagggcgaccaccattactactacgacgccttcggcaacctgattcgcgaacgacgcggcaagggccatcaactcgtcaccgaataccgctacgactgtcagcatcgtctgatcggcgttaagacgcccaacggccagactgccagctaccgctacgacccgtttgggcggcgtatcagtaaaaccgtagatgggattacgaccgaactcttctggcaaggcgacaaactcattgccgaacaccacgccaatcggcaccgcagctacctctacgaaccggacagcttccgcccgctagccttgctggaaggtttcggccccaaggaaacccaggcctaccactaccaacttgaccacctgggcaccccacaggaactcaccgcccaggatggcgaaatcgtctggtccgcgcactatcgcgcctacggcgaaatcagccgcctcgacatcggaaaagtcgacaatccgctgcgtttccagggtcagtatttcgatcaggaaagcggactgcactacaaccgccatcgctactacaatccggatgttgggcgttacctgacgcctgatccggtgaagctggctggcggaattaacacgtacctgtacgtgcctaatcctacggggtgggttgatccgttagggttagcctgcaaatcaacgaactgcccccaactgatcaacgctcaaaaatgggaattgaaacctgctgttgatctggactggcgtaatcaaaacggtagtgcctatgagcaaatgcatattggtttagatgaagcttttcgcaggacagatatacctaaggatgaatacagcgtcacgaagtggggtaaagaccaatatggaaaatcttttccaaccgaatggagggttgaaaatggaccaaaaaaaggagcggaagtcaacatagatgaccctacacttgtttttagcaagaaaggtccacaatcaccacatattggctaccaaactccaggcaaaagaaccggtggaggagcagtaagaggacatatattgctcaacctgctcccagttagccgttcaaaaataggggaaaactgatgaattatctagaagcagaaatagacgaagtgctcagcacacttagtattaaacataaaaaacttacaacagaagagattagctcattaatcaaagcattaactagacgttttttcacaactgaaaaatccacacttgaccctatggacttcaatgagacaaatgccgagtacaactcgaatttctggaaagaaataacgagacacataaagaaaacagatctaacactaatcgtttacgatacaaactatagagcatggcaaataaataccccacaggacattgaacttcttataggtgaaacaactggctatccattctggctaaccgatcgcgccctaacatttttgatccacttggacgaccatgactgtgtaagctcagcagaaaaagaatgacaagtactcagcaacagaaacaccgccaccgaccgctaaaacttcggacattaggcccccactcgagaaacacacacccaagcaaaattaaataaattaattttccgaaaaagaaacacctgaaatacttatagaatcaaaccccacttttagttctaggtaaaaagggcaattactatactgaaatccttgcaatgatatgaactactaccccccaatccaggcgaagaaggttttcaggtaaatcggctacggctacgacgcctgcggccagctgcaaaacctgcgcctgccagacaacaaccgcctcatcttcaatcacgacaaaggccacgccctcgtcaccgaataccgctacgactgtcagcatcgtctgatcggcattaaaacgcccaacggccagaccgccagctacctctacgacccgtttgggcggcgtatcagcaaaaccgttgatgggattacgaccgagttcttctggcaaggcgacaaactcatcgctgaacaccacgcggatcggcaccgcagctatctctacgaaccggaaagcttccgtccgctggcgctgctggaaggttttggtccaaaggaaaccaaggcctaccactaccaactcgaccacctcggcaccccgcaggaactcactgcccaagacggcgaaatcgtctggtcggcgcattaccgtgcctacggagaaatcagccgagtcgacatcggaaaagtcgacaacccgctgcgttttcagggtcagtatttcgatcaggaaagcgggctgcattacaaccgccatcgctactacaatccggatgttgggcgttacctgacgcctgatccggtgaagctggcgggtgggatcaatgcgtacttgtacactaccaatcctacgggctgggtagacccaataggatttgcctgcgcgcgcggtaattgtccgggacaaagaagcaaattaaaaaaaccacacgagaaagcgccccctgaaataggagatgtggttcactctgtcacttatgaacaggctttaaacaaagctctagtgtggttattagaaaataatttccgggcagaaataccaaagccaggaaaatttggaaaaagaaaaggggatcccataggaatgcaaacatccgatagacaaactggctatcgtgttgaatacgaccaaaatagtggcgcacatatcaatgtatggacccataaaaaaaacggcccacattttacatttgaaggagacgaaaaattggtgatccagctaattaaaaggtttgcaaagaaatgagctatcttgacgatgaaatcattgacgacttcaaaaaaatcaacataaaaatcaccatcctaacaaaagtcaaacatgacctcatggtagaaaacatcagtcaaaacatcccattctccgtaacaaatatcgcatggaacttattgaaagatagtatctatctgggtgtagcaacatcacaaacgtcaatggatgcacttgcagaaaaaatcacacacaccacaaaagcggacatcattattataggcgacgccaccgatgaggcttattcaataggtatcaagcagctctccccagcattgagaatattttcgacgattccgcagcatacatacataactcaagaaagcttagattggatagcaggcatatcttttgaaggctatatatatttttgcaaactccaaccccccaaaaacacaatccgacatcaagaaaaaaccgagtaaaaataaatgttccaaaacacatgctagaaaaaactgaaatccaaggattgctgcgtttacctatcgaatatatacatcgattttgattgcgggcctgatgatagggtcgacggttttgacctctggcggttatatgtttacacatgttagctgccgcaaaaatacaaaaagtacaccgacaaagaatacctggcgcatgaattcgatgaatatttgaaactgggcaaagccaagaaaatcccaagctccatgtccagtctgtacttcattcagcaatgaacatgactgcccagcctgatgagcaatcaggccctcacccccacgccaccagcaacaaccccagccccaacaccaaacacaacggcgaataaaaatacgtataccacctcgagaaccccgctgcgcttccagggccagtatttcgatcaggaaagcgggctgcattacaaccgccatcgttactacaatccggatgttaggcgttacctgacgccggacccggtgaagctggcgggtgggatcaatgcgtactagtgcgcgcccaacccggaattattgagcgctacacatcgggcccaaacacaggggaacctaaatacccacccgctgcaacacattatctcgtatgcgatccataaaccccacctgcccaacagcaggttaacggtttaccgtggcatctctggcgagcagttccatggcagcagtgcttcgtagtcctctactgccgaggcatgcggcagcctctccagtacgtggcgcagccacgtatagggctcctggccgttgaccttggcggtctcgaccagactatagatctttgcgctggcagtggcgccgttgacggtatcgctgaacagccaggccttgcgcccgatgacaaacggcttgatcgctctttcggccgcgttgttgtcgatgggcagataacccgcttcgacatagcgttccagtcggctccagttattcgccaggtaatgcaccgctttgcctaatgcactttgtgccatcacctgcggctgggttttatccagccaggcttttaactggcccagaatcggcaggctcttttcctggcgaccgataaaccgctgctcatcactcgcgtctttgagttcacgctcgatcccgtacagcttgttgaccattgccagcgcgatatcggcccgtccggttttacccttgggctgcactttttgcgcatccacgaacttgcgtcgcgcatgagccatgcaggccagccgttccacgcccggttgcaaggccaaggcgttatagccggcgtaatcatcggtcatgacataaccacgataactttccagcaggcgcagcggcacgtcctgcgcacggctggaggtgtagtcgaacagtacgactttacgatcaggcgggccgctggcttgcacccacatccaagattggctggtcgggtctcgatccggttctttcaacacctggacgcgggtttcatcacagtggatcaccgggctttccagtaatcggtcgcgcatcaaattaagcagtgactggaagtgctcgctgcactggatcacccagcgggccagcgtttgccgaggaatttcgatgccgtgtcggctcagcacgctttcgaaacggtgcagtggtaaaccgtcgacatatttcgtggtcagcagcatggccaatacgcttgggctggccatgctcttttcgatcagttgtgcgggtttgtcagccgtgacaggggctgcttcgcagccccggcaaccgtagaccttgcggatatgtttgatgacccggatctgcatcggcacgatatccagctgctcgctggtttcttcgctgatcacatgcttgcggcaaccgcaggcacaggtctgttcgtgttcgggtagttcgtggatcacttcgatacgcggcagatcggccgacaatggcttacgtttgccacggcggggtgtcggctcaacgacctcttcatcagcgtcgcccactaacgacatgggttcgctttcaggttcgttgaacaaagccagttgcggcgtattgggctcaacggtttgctcggacttgcgcccaaacagacggtcacgcaacagcttgatctgttctttaaggtcgacgatgtgggtctgataagcctgagctgtttcgtcctggcgattgagtgcctcaagcagcaattgcttgagcaaaacaggatcatctggaaggtcgtcgggcaaagaaatcatggcccggattataccgggtcacgccacgtagcgcggcgtcaaaacctgatgagggcggttgcgccagaggtcaaaaccgtcgagcagccagttcagctcctggacgctgaggataatcgctacgtccgtgtcatcgggggatgttttgaaacgctcggattccaggcgcttgagccaaagacagaagccgttgcgttcccaatacaatatcttgacccggtttcgggatttgttgagaaagacgaaaagcaccggatcgaagaccgccacttttatatccagttcgaccaatgccgcgagaccgtcgatggattttcggaagtcgacgggcttggggtagaggtacactttttcgactttggcgtcgggacgcatcatggcgaatgggctcctgaaagaaatcgggagcacagcatccgggatcacgtggcgggtttgaatgtggggttcatggagcggttacattatctcagccatagagatcagttaaactcgatataccgagcccagcttatttttagacgaaacggacacacttcatcattagaaccaatgaatatgggaaaatttgttggcgaaggatactcaagagaaggaatagaatatagccaacaacgtaaagcaagggtgatattaaacaaccaaggccacccaaaaactgcatacacggagaaatgactaaaatgaaaaataagcctagcatgtcaataatccgtggactactgttcacttacgacattgaaaacactgacgacttagagcgagaagaactaattgcatcaaaagacgtaaataatgaaaaagaactttccgatctttttgacgagttaaccaaaccagaatttctcgattatacgaggagtgagcaggagtggttcattgcctcgatcacacatttcttagccatcaatgacaattttgatgcgattttcaaaagcatggcaacctatttcagcgcacccgtaattaatcagaggaagtttatgcaggtcttattgagatgtttaaaaaactactacgactcgccaagatcggagaattaagaaaacaagcgcatctggcttctgcctgggtaggtatcgaagaattctaataagccagcctcgaagactggtcaacctggtaacccaaacaccgccctccaaggcaacaccgcccctctgtggcgagcaggcttgccctgcgttgggccgcgaagcggcccgagtccaggcgatgggtgttttcaggtaacccggcattgtctgttttggggctgctgcgcagcccaacgcagggcaagcctgctcaccacaggaaggctgcgaaccacaacaagcgggttcacccaaacaaagggggctcaccaaccttccttgagcatgcgcaactcaagatgctgcaacaacatgatggtcttcccatccacaatctcgccgttctgaaccattgccaaagcctcttcaaagcccagctccagcacttcgatatcttcgccctcctcttccaagccaccgccagtcccaacccgatcacccggctgatattcacccatgaaaaagtgaatccgctcggtcaccgagccggggctcatgaacgctgcgtagattttctcgacatggccgacgcgatagccagtctcttcctcggcctccaggcgaatgcgttcttcgggactggcgttatccagcaacccggccgccgcttcgatgaggtagccatggtaatcgttgacgaacgtcggcatgcgaaactggcgaatcagcaacaccgtacgctgcacgcggttgtacagcaggatggtcgcgccattgccccggtcgtacacctcgcgggtttgggcttgccagctgccgtcgcggcggcgcaggtcgaagctgtattttttcagcaggtaccagtttttcgaaagggtctcttcagcggtgatgcgcacggggctatcagccatggtcgttttctcaagaaagggaatgtgtctgtttgatgcgatcccaggcagcggcgacttcttctgcgctgctggccttgatccgcgccagattacgcggatattcaaccccggggttttccgtaaaccgcgtggcggtgaattggccgttgctcgcgcgcaggatgtagccggtgtcttcacactgcgccgacgccaggtacaccccccctggcgtcacccactccggcttgagttcatccggctcgtcagtcacgccccacatgcgcgtcttcgccaccggcgagattgcattgactttgacgcccgcctccagcccctcatggctcaacgcattcatgatccccagttgggccatcttgccggcgctgtaggccaccaggccggtttgctcgtactgcgcgtacatggcgcggtcggaggtggtgaggatgatgcgcggcgcgggtgaacgcagcaggtgcggccaggcgtgcttgcacagccacagcggggcgtagaggttgatgtccatggcacgctgcaggaacgtggcgtcgaggtcggtgatgttctggtaacccacccagccggcattgtgaatcaggatatcgagttggccaaagacctcgagggtgtacgcaaccaactgccggcagccctcgttcgtggacaagtcgccgccgtgaccgatcacgtgcaagccttcggcctgcaacgcctttgccgccgcctggacgaccgttgcatcgctgcctgcgcccgcgctgtcggcgccgatatcgctgatcaccacccgtgcaccgccctgggccagggcccgtgcgtaacagagccccaacccgcgtgcgccgccggtgacgattgcagtcttgcctgtgaaatccatgtgcttgctctcctgttcggcggcccaccctaacaatctctgcacgtattgttcaatgcagtaacactttgtaagaaacacccatgggcggctgtcgaattaatacctgcctgggcaagccatctggtaaaacccctgcttgaccttttacctggaaccttcatgtcctcacgttttctctcgcgcctgagcctgcgctggtttcccctggtgtgcatggcgctgttgatcgtcggcctgccggtgggctgtgccgtgctgcaacacaaggaacgcgaactggtgtttcgcatcgagccgggcaccgccagttggtacagcggcttgcccaaggcggtgcaggaattcgagctcaagccggccagcttcaaatcggggcagaatatccatggctggtggtacccggcggacaagaaagatgctcccgcgatcctctacctgcacggcgtgcgctggaacctcaccgggcagctgtttcgcatcgagcaactgcacgccctgggttattcggtgctggccatcgactatcgcggtttcggccagagccacggcgagctgccgtcggaaaccaccgtgtacgaagacgcacgcatcgcctgggaacgcttccaggtgctgcaacccgacccacagaaacgcctgatctacgggcactcgctggggggcgcggtggccatcgacctggctgccgaattgggcaaacagacaccgttgccggtgcgtgggctggtgatcgaatccacctttacgtcgctggcggatgtagccaccgccgtggcgaacacctcactgccggtgcgttggttgctgtcgcagaagttcgattccatcgacaagatcgccgacatccatatgccgctgctggtggtgcatggccttgacgaccgctatgtaccaccgcgtttcagccagcagttgtttgaagccgcccgggagcccaaacggctgttactggtgcccggtgccagccacaacaacagcatgagcctggccggtcgcagctatggccaggcgctggacaaattgatgcaagcgaagatgccggcgcaggttgtcacccactccacaggccgcaacggcgactcgtaaaaacgtttttcggcactgggttagcgcttgcctgtcaagcgcaaacccagcccatgctgggccaaatccgaagttgatcaaatattgatcttggcttaaatcgccaaccctgccggggcttcgcaaagttatccacagagatacccacggttttcgtggacaactctttttatttttttacgttttttttgctcagaaaaggttttccgggaatgtccccggcaacaaaatctcgcgattcacatcgcgtatatcgttatacccacacagcgccatcgtcacgtccaactcacgggcaatgatctcgagcgccttggtcacacccgcctcgcccatcgcccccagcccatacaaatgcggccggccgatcatcgtacctttggcacccaacgccactgccttgagcacgtcctggccggagcgaatgccgccgtcgagccacacctcgatacgctcccccaccgcctccacaatcgccggcaactggctgatgctcgacggggcgccatccaattgccgtcctccgtgattgctcaccaccaacgcatcggcgccggcattcgcggccaggcgtgcatcctccacatcgaggatgcccttgatgatcagcttgccaccccagcacttcttgatccactccacatcatcccaactcagacgcgggtcgaattgctgggcggtccaggacgacagcgaactcatgtcggccacgccttttacatgcccgacgatattgccgaagccgcgccgtttagtgcccagcatgcccatcacccaacgcggtttggtggccatgttgagaatattcggcaacgtcagtttgggcggcgctgacaggccgttgatcaagtccttgtggcgttgcccgaggatctgcaggtcgagggtcagcactaatgcatccacgccggcggccttggcgcgctcgatcaattgctcgataaaggcgcggtcgcgcatcacgtacagctggaaccagaacggctggccgacgtgctcggcgatgtcttccagcgaacaaatgctcatggtcgacaaggtatagcgcaggccaaaggctgcggcggcgcgagcggtgagaatctcgccatcggcatgctgcatgccggccaaaccggtcggtgccagcgcgacgggcatggccatatcctggccgatcatgctggcgcggatcgagcgctcgtcgatattgcgcgccacccgctggcggaacttgatgcgggcaaagtcgctttcattggcgcggtaggtgctctcagtccaggagccggaatcggcgtagtcgtagaacatgcggggcacacgtttttgcgcgagcttgcgtaaatcttcgatggttgtgatcaacgacatctaggtcacctctccctggactgaacgctgagagtaaccgcccatcgcgcgcacaaccagccattgcgtttatagcccagggcaattaatctcgcacaaacccgcaaaaagacgcaaaaccatgcacaacacgcatcaagccatcgacctgccttccttgcgcaaacagaagattttgttgctgctggagcgcgacggcaaagtcaccgcctcggagttggtggagcacttcgccgtgtcccaggacaccattcgccgcgacctcggcgaactcgccgccgccggcctgctgcaacgcgtgcacggcggtgccttgccccgacccaaagacaccggcaaggattttttcacccgagtgggcgaaaccaacgacgccaagcgccacctcgcgcgcctggccgccgagcgggtcgaggacggccagatcgtgctgttcgattccggctccaccaccctgcagatcgcccagtcattgccgcactcgatccgcctcacggtagtcaccacatcgcccatgatcgccatcgctctggccgaccatcccgacgttaaagtgatccttaccggcggccaactcaacccggccacgctgtccaccagcggtcatgaaaccgtgcggctgatccagagcgtcaaggccgacctgctgtttaccggcgtgtgcgcgctgcatccgcaagtcggcatcagttcgctgcattttgatgaagtggcggtcaagcaagccctgctcgacagtgcgtcccacgtggtggcggtgaccatggccgacaagctcggcgccgtggagccgtttgtggtggcgccgtgcagtcgtattcacacgctgatcaccgaatggcacgtgccgagtgtggaggcgtatgaacagctagggttggaagtgctgcgggtagaggtcgagtaggcacagtcagaacagcacctcggacgcatcgcgcatgaaaatctcgatggtcttggggcctacaccgtcgaattccccaaggcgtttttcgaaggcctcacggctttcgctgacactgcgcatatgggtgatcttgccggcgtattcggcgttcaacctggcgctgaggtcgagcaagcgttgcgcggtggtttcgtcatagcgcacgtaatgtgcgcgtccaagcatggccaccaattcacgcgatgtgcagtgctgcagcttgcgcgcagtgtcacggcctgcctcctcgacaatcactttataggcctgcgcggcaatcggtgcctggatacgcttgcccatcaggaagctggcgataaaccacttgaacagagcgtggtcatcgccgggcttgaggtcgatgcccaactccgtcgcgctgatggcacgggccatgctcagtggcccagcttgcgctcggccttggcggcctgttcgttgatggcatcggtctggcgttcgatgtcctttatcgaggtgggcgtcaccactttatcgatggtttcggtcttgggattcgggcggtccagggtttggcccttgacgggtttttccgtgccgctctgggcttcttcagagctgatgggtgcaggggttttatcggcagtcatggtgtatctccagtcaattgaaagcccgtgaaaacgccgggcgcttaagcagcagaggcttgccggtgtggatagttcaaggaaattgcccgcgccaaccgtccgagaaataagcgcaaattaatttaaacctttgccgtgcgagccggatcaactctcccagatcccattccccatcaggagacactcgatcatgagttcacacctaaacggcaagaagattctggtcatcacctccaataccggcatcgagcgcgacgagctgctcaaaccgttggaagcactgcgcggttatggcgcgacggtgacccacgcctccagcaagggcggcaccacacagacttttgtcggcgacaccgagaaagaccagacggtggaatccgacgcaaaactgtccgagctcagcgctgctgatttcgatgcactggtcattcccggtggcaccgtcaatgcggacacgttgcgccaggatgcggccgcgttgaagctgatcaacgcgttcgtgcaggccggtaaaaccgtggccgcgatctgtcacgggccatgggcgctgattgatgcaggcgtaatcaagggcaagaccctgacctcctacaagagcgtgcgcatcgacctggaaaacgccggtgccgccggctgggtcgatgccgacgtcaaggagtgcaaggctaacggctggacgctgattacctcgcgtacaccggacgatctgccggcgttcaatgaggcgattgccaaggctttggcaggctgacacccaagggctgaacgaaaacaggcgcctcgaaggcgcctgtttttttatgggctgatgcctcagcttttacgatgctccggcatttcccgtttcggcccgaacatcgcccaggcgatcagcccgaacagcggtacaaaaatcagcaccaccagccacaatcctttcgactcccagccccccgtgctgcgcaacacgatattgatcgcccacaattccagcagcagcagaatcactgccagaccaatccagatatattgaatttccatgcttcacctcctaggtcatatgccttaggtcaagcaggggccgcgagggttcattaaaattttcgcgatggctcatccgcaacgggtggctcgggtgtaagcccccagtcgccgtgttcataccagtcatcaccgagcatctcggccgggtgcatggtgcggtcggcaccattgccgcaggcgaggtcggaggcgccgcaatagcggtcacacccccagcagatgcgttcagggtgtttgggatgcagcggaaatggcttggccatgaagcagtttcctaccggcgaactgtgggtcaagcctaacgccacgatcccaacccagccttgacccggatcaagccgggcaatcatgaaatatcctgcaaacttgacaagaatcattattattcacgccagaccttcctagactcgggctctctcccctcacccgtcaggaagccctcatgcgtacctcatccctgctgcccatcctcctgttgatgaccacctgcgcagcgtccgcgaaagagtatccaatcggcgaaccgcaacactgcccggggctggaaatcggcgcggtgtacctgcaaccgatcgagatggcccccgccggcatgatgcgcgccaccgccgattccgacgtgcacctggaagccgacgtgcgggccaccgcagacaacgcgcagggttttcaggaaggcagtttcgtgccttacctgaacctgtccttctcgctgaaaaaacaaggcgacacgccgcccatcaacggtgacttccacgccatggtcgccaatgacggcccgcactatggcgacaacgtcaagctgcaagggccgggaaaatacagcctcaccttcaccgttaccccgcctttcggccaccattccctgggccgtcataccgacaaggaaaccggggtcgcgccttggttcgaacgctgtgaagtgcactacgaattcgtctacgccggcatcggcaagaaaggtggttattgatgcgccgcgccctgctgctcggcgggtgtgtgctgaacggcgcagccttggcggcaccgttacccacctatgaactgaacctgcaagacggccacttcaccccaccccaattggcggtcaaggccggcgaacgtttcaagatcgtgctcaagaacctcggccaaggcccagccgaattcgaaagcacgccgttgcgggtggagaaagtcttgtcccctggggtgaccacctttgtggtgatccaccccctcaagccaggcacctatccgttcttcgacgaattcaacccccaactgcccgaaggcagcatccgtgccgaataggagccgttgatgaacacatcgatgtttattgtgtggcgcgaaagcgtcgaggcgctgctggtgattggcattctgcaggcctggatcagctgccaggccggtcgctcacgcctggcccgttacctctgggccggcgtgctgctgggcctgctcggctccgccgggttggcggggttgatgctgtgggccggcgaaaccatgaccggccccgcgggtgaatggctacaagcggcgctgaccctggtcgccagcggcctgatggtgcagatggtgttctggatgcatcgccatgcgcccaccctcagacaccggctggtcagtgaagccgaccagcgcctggcccgccacggcggctggggtgtgttgctgctggccctgctggcggtaagccgcgaaggcagtgagaccgtggtgttcctgtatggcgccggtgcccgtctgcacgacgaagccctgggcctgtttgccgtcggtggcgtgctggggctagtgctggccgggctgaccgtggtgctgttgcgcagcagccgacgctttatttcctgggcacgttttttcgccctcagcgaagccttgctgttgctgctgggcggcgcgttattggtcgctgcggtggaccgcatcagtgggcagctgctggcgatggacatgcccgactgggtctactcggccttcggtgacagccgctgggacagcagcctgctgctgaacgacagccacggcctgggcgcgttgctggcagacttcgccggctaccgcgccgcgcccagcctgatcacggtgctggtgttgctcggctattggctgctggtgggcaacggcctgcgccggtcacggcaagccgcatgagctggctacagcaactgggcgatggcatgcgccgccatgggcggctgatccgaagtgtgcaatgggcggtggtgctggtgtacgccgtgctgctggtgttgccgacgctgctgcccctgccggacagccaggcgcgcctgctcgacaacctcacgctgcttgcgcaattcatcttctggggcctctggtggccgttcgtgttgctgtcgatggtgctgttcgggcgcctgtggtgcggcgtgctctgcccggaaggtgccttgagcgaatgggccagccagcacgggcgcggcctgggcattccgcgctggctgcgctggggtggctggccgaccctgggcttttgcttgaccacgctctacggccagttgatcagcgtgtacgactacgcccaggccgcgctgctgatcctcggtggttcgaccctcgcggcggtcgtggtcggcctgctgttcgtgcgcggcaaacgcgtctggtgccgctacctgtgcccggtcagcggcgtcttcgccctgctcgcccgcctggcgccggtgcacttcgccgtcgatgaacaacgctggaaggccaacgccgcgccacgcctgccgttgcccaactgcgcgccgctgctggacatccgtcgcctgcaaggcgccagcgaatgccacgcctgcggccgctgcagtgggcaacgcggtgcggtgcaattgatcgcccgctcatgcaaccaggagattctccaggcacccctgcaccacggctcggcctgggacatacgcctgctactgttcggcgtgatcggcctggccataggcgcgtttcagtggacggtaagcccctggttcatcgccctgaagcaacacctggccgagtggctggtgagccgcgactggctatggccgctgcacgacaacgccccctggtggttgctcacccattacccgcaaagcaatgacagtttcagctggctggacggggggtgcatcgtgctgtatctggccggcagctcgctggtggtgggcggcggatgctggctgtggttgcaactggctgcgcgctcggcgggcgatcgcgcactgtttcggcccctggcgctgacattgacgcccctgggtggtgcggggttgttcctggggttgtcggcgaccacggtgaagctgttgcgctatgaaggcttggtattggcgtgggtgcaaccgctgcgagcggggatcttgatggcggcgatcggctggtgcctgtggttggcgtggcaacgactcgagggactgcctcgcggacgggcgtggctgtgcatgctgatgagtaccgggttgatcggctatggctggtggctgcagttctggggctgggccaactgaagcattgagactgtgggagggggattgccccctcccacatttgccaacttctcgctagaccttgaagcgcgccacggtctggtgcagcgcccccgccatccccgccagttcatgccccgccgtctccgtatgcaaggcgccctgcaacacctgctgcgacagggtgcggatgccaatcaggttgcgatccacctcccgcgccaccagcgcctgctcttcggtggcgctggcgatcatcatgttgcgctcgttgatctgcgagatagaccgggtaatttcatccagcgcctcccccgaacgctgcgccacgccgagggtcgcctgcacccgctcactgctgctgtgcatggccgccaccgcgtgttcggtgtcctggcggatattgccgatcatctgctcgatctcctgggtcgaggcctgggtgcgatgggccagcgcgcgcacctcatcggccaccaccgcgaacccgcgcccggcatcgccggcccgggccgcttcgatggcggcgttgagggccagcaggttggtctggtcggcgatgctgcggatcacttcgagcacgctgctgatatcctgcacacggcccgccagttgctggatgcgctccgaggtttccaccacgccggtggccagggtgttgatcgacgccacggtctcctgcacctgggcgcgaccgcgctgggcagtctgttccgacaggcgcgaagcctcgctggtactcaccgcattgcgcgccacctcgtccacggcggcggtcatctcattcacggcggtggccgcctgctcgatctcctggccctgggactgcaagctgctgctggtctggctgctgaccgcgctcaactcttcggaggaactggccacgccgtccaccgacgcggcaatctgccggaccatctggttaaggttctgctgcatctggtgcaggttacgcatcacactgccttcggcgctgttgcccagcggcacttcgatggtcaggtcgccttgggcgatatggctgagtacgcgcgccacctcatccggctccccgcccagcgggcggatcacgctgcgggtgacgatgacggcggcggtcaccaccagcgccacacacaacagcagcagccccagcatggtacgccgggcgtcgtcgtacagcacctgcgccgcctgctcacgctcggcgaacacgcgtccctgcatggccatcagcgcatccaggctcttgaacaccgcaagctcggccggcatcacctgttgcttgagctgggccagcccctgttcgcgggcgccctgtttgatcagcgcctgcacctgggtgaaggccgccacataggtttcacgatgggccttgagggtcgcataggcggcctggccttcggcagtatcgagcaacggttcgagggttgcgaacgcctcggtgatgcgttgccgggtgctgccgatcgaagcttgagcggcctgattatctgcgtcgatcagcaggtcgcgggtgttgcggccgttatcgcgcacgccggtggcgatcaccatgatcggcgcgattttcggccagtcctgctgcacgatctgtgcggattgttgcttgagggtcgccaggtcgtgcaaggcgtagaacaccaagccgaccagggccagcggcgcaatcgcgaaaccgatgacaatgcgttgtgccgtggttaactgcttcattctgaacattccttgatgaacacctgcccaccatgggcagcatctttaaaaaccggttgagggtgtcggtcaccctcgcaagacaaacgcgggaaacaactcgcgcaaacggccccacagctcgggcaacgcagcctgtgccggtgcactcggcaattgcgggtcgagcatgctgacggtgcgcaccatctgcacggcgaagcgctgcacacccgtggcttgcaaacgctgggccagccgcaacaaccggggtggatcgatcaggtgccaatgcaccgtggtgcggcactcgtagtccacgccactggcgagcaaggtgtcgaggctgcgccagttggcggcgccactgcccttgacctgggtgatcgactggcagtcttcggccagggccttcacgtcgaacccgacccagtcggcatgacgcaacgcattggcaaaccctgccggtttgatcccggcgctgtgcaagccgatgtgaaaacccatcgcccgcacttcatccatcgccgccggcaagccttcctgcaaggtcggttcgccgccgctgaacaccacggcatcgagcaagtcccggcgccgttgcaggaacagcagcacccggcgccaatccacctccgtgctggcgcgcggcgggatcaggtccgggttgtggcagtaacggcaacgccaggcacagccctggcagaacagcacgcaggcgagcatgccggggtagtcgagggtggtcaggggcaccaggcccccgacccgtagcgctcggctcattgccgcccggccgccgcagccgtttcggtgaagtgcacgcgctccttgtgctcggactgcttgccggggttgaacgccgaaaccggccggtgataacccatcacccgggtccagacttcgcagcgctgacgttgtggctgggatgcttgcatggtgaatctccttggggttgaaaagcttggtttaacgggcggctgccagggcttcatcgcacttggggcagaactcatgttcaccggccagatagccatgcaccgggcagatcgaaaacgtcggcgtcaccgtgaggtacggtaggcggaagcgccccagcgccttgcgcaccaactgcttgcaggcctgggtcgaggaaatctgctcggccatgtacaggtgcaacacggtgccgccggtgtatttgcattgcagttcgtcttgcagctccagggcttcgaaagggtcctgggtaaagcccaccggcagttgcgacgagttggtgtagtacggcgcgacatcgctgcccgcttgcaagatatcggggtagcgcttgcggtcttccttggcgaagcggtaagtggtgccttcggccggcgtcgcctcgaggttgtagagatggccggtgtcttcctggaagcgcagcaaagtggcgcgcacgtggtcaagcaacttgagcgcaaaggcgcggccctgctcggtgtgcatgccctgctcgtcaccgctgaaattgcgcagcatctcgtgcatgccattgaggccgatggtggagaagtgattgcgcagcgtgcccaggtagcgtttggtgtaggggtagagaccggcgtccatgtgatgctggatcaccttgcgcttgacctccaggctctccatggccatctccatcaggctgtccaggcgtttcagcaagcccgaggtatcccccttgaacaggtagcccaggcgcgcacagttgatggtcaccacccccaggctgccggtctgctccgccgagccaaacagcccgccgccacgcttgagcaattcgcgcacgtccagttgcaggcggcagcacatcgagcgcacctggttgggctgcatgtccgagttgaggaagttctggaagtacggcaggccgtaacgtgcggtcatctcgaacaggcggtcggcgttgtcgctgtcccaggggaaatcatgggtgatgttgtaggtcggaatcgggaaggtgaacacccggcccttggcgtccccggcctgcatgacttcgatgtaggcacggttgatcaacgccatttcggcttgcaggtcgccataggcaaacggcatttcctcaccgccgatcaccggcacctgttcacgcagatcttctgggcagacccagtcgaaggtcaggttggtaaacggcgtctgggtgccccagcgtgacggcacgttgaggttgtagatgaactcctgcaccgcctggcgcacttgcggatagctcagctgatccttgcgcacatagggcgccaggtaggtgtcaaaggaactgaacgcctgcgcgccggcccactcgttctgcagggtgccgaggaaattgaccatctgccccagcgcgctgctcaagtgcttgggcggccccgcctccacgcgtcccggcacgccattgaggccttcgtgcaacaacgaacgcagggaccagccggcgcagtaaccggcgagcatgtccaggtcatggatatgcaggtcggcctcgcgatgcgcacggccgatctgctcgctgtagacctcatccagccagtaattggcggtgaccttgcccgccacattcagcaccagcccgccgagggaatagccctggttggcgttggcctgcacgcgccagtcttcgcggtcgaggtattcgttcatggaggtggcgacttccaccagggtcttgcggtcgcggcgcaggcggccgtgttgttcgcggtagacgatgtaggcgcgcatcgacaggaagtagccggcgtccatcaatacgcgttcgacgctgtcctggatttgttcgacgtccagttggtcgatgcctctcaggcgggccaggacggcgcccagcagcaggtcgacgtcggggggctggtattcgccggtggcggtgccggcggcgatcagggcctggcggattttttcggcgtcgaaggggacgagcgtgccgtcgcgtttgtgtaggcgggtgctggtcaggggggtgagcgcggtttgcattggggggctccagacactacatatagatattttttagtctttaaacacaatatgcggtgatattacgaatagctcggagagtgtcccttgatcgggatcaaggtttttatgatcgggggcatatccgttatttaggtcacggcggatattggttccgcccttacggcgggtcactttggaaaagagcctgtatggaccggacacatggttgacgggtgtacggggacatggtggacacttttcggcggataaacttcgccgggaaatcatcatgccttgggacacgagagataccatgagcctgaaagaaga

SEQ ID NO: 115 - DNA, 14711 bp, Pseudomonas nodulensis; identical to SEQ ID NO: 9

SEQ ID NO: 116 - DNA, 12189 bp, Pseudomonas nodulensis; identical to SEQ ID NO: 85

SEQ ID NO: 117 - DNA, 76811 bp, Pseudomonas nodulensis
aatcactgtcgaattacgggcacaccgagcctaagcgaggtgccgagtgttggggcaagagcgttttgcttacttttgcgctctatcaaaagtgagccgccgtaagggcggaaccaataccagccatcacccaaataacggatatgcccccagacttaaaccaacacccccacacacccgaccaccacccaagcccaccccaacaccccccaccgccacccccaaggcgcatcccgcaattccatgaacccatccgcaatcaaccacgacttgccaaccgccaacagcaacaccccccacccaccagcgccccccgccaacaccgtccccacactcaacaaaaccagcaccacccaacacaccatcaacccctgcgacgcactcatccgctcctacctcatcacatacaccaccggaaacaacaccacccacaccaggtccaccatgtgccaatacagcacccccgactccaccccattcaccgccaccccaccccgccagcacaccaacgccagccacccaaggatcagcatgcccagcagcacatgcaggaagtgaaaccccgtcagcacccagtaaagggtgaaaaaccggctgtactccatctccaaccccacctccaccagatgggtgtactcgccaagcttgatccccacgtataccagcgccaccagcagcgccgcgccaaacagtccggcgctgcgctgccaatgtcccaggcgcacctgctgcaaggccaacgccgcgagcagcccggtcgtcaacaggctcacggtcatcgccagcccgctggaggtgtccagttgtgcgcggcccgaggcaaacaccacgggttccaggcgctgggtcacggcgaatgccaggatcagcatcgcgaacacggtcaattcggcgaggatgaaaaaccacatcgccaggtcacccggcaggcgccggggctcaggcaaagtgcacatccaccacgtccatcagcccggcgacggtctgcgggtcgtcgctcagggcctgggccaggcaagccatgcaggcttcacgcgggggcatgccggcggcgatcaggcgggcggtgaagatcagcagacgggtggaggcgacttcttccaggtcgtgttgatccaggcgccgcaacgcctggcccaggcgtaccacctcagtggccaacgcgttatccacctgcgcctcccgggccacgatgcgcgcttcgtccgccgccgccgggtagtcgaagcgcatcgccacgaagcgttgacgggtgctgggcttcatgcccttgagcaggttctggtagccggggttgtacgacaccaccagcatgaacgacggcggtgccttgaccacttcgccggtgcgttccaggtacagctcgcggcggtcgtcggccaccgggtgcaggaccaccgcagtgtcctggcgcgcttcgatgacttcgtccaggtagcagatgccgccttcgcgcacggcgcgggtcagcgggccgtcctgccaccaggtgccctgggcgccgatcaggtggcggccgaccaggtcggcagcgctgaggtcgtcatggcaggccacggtgtacagcggcaggttcaggcggtgcgccatgtgctgtacaaagcgggtcttgccgcagccggtcggacccttgatcagcaccggcatgcggtgacgccaggcgtgctcgaacagtacctgttcgttggcgaggggttggtagaagggtgtggtcatggccggtatccaaagcgggttcgacagccacgctaagggcgcctgcgacaacctggcaagcgctacccaaggcaaacttgatcgccgtcaagcgagcattccaacacgtcgccatagtctggccgggcactaagaacctgcgccccgcacctgttgcgtggcatcgcaaaggtctcgcctgaggagtacatggaatgctgactcgcacccgcaaaaccttcaccctgagcctcgccagcctgagctgcgcgctggccctggcaatgcccccgacggcccatggcgccgcgcaacccgcgctggtgaaaactgccggcgcaccggacatgagccaggccgacttcgacacctccaagcagatttacttcgaacgctgcgccggctgccacggtgtactgcgcaaaggcgccaccggcaaaccgctgaccccggacatcacccaggcgcgtggccaggcgtacctcgaagcgctgatcacctacggctcccccgccggcatgccgaactggggcacctccaatgcgctgaccaaggcgcagatcagcagcatggccaccttcatccagcacaccgcgcccacaccgccggaatggggcatggccgaaaccctcaagacctggaaggtgctggtcaagcccgaagaccggccaaagaaacagctcaaccagctcaacctggacaacctgttttcagtgaccctgcgcgatgacggcaagatcgccctggtcgatggcgacagcaaaaagatcgtcaagctgatcgacaccggctacgccgtgcacatctcgcggatctccgcctcgggccgctacctgctggtgatcggccgtgacgccaagatcgacatgatcgacctgtggcccgccgagccaaccaaggtcgccgagatcaaggtgggcatcgaggcgcgctcggtggagacgtccaagttcaagggttacgaagacaagtacaccatcgccggctcctactggccgccgcagttcaccctgatggatggcgaaaccctggagcccaggcagatcgtatccacccgtggcatgaccgtggacaagcaggagtaccaccccgaaccacgcgtggcggcgatcattgcgtcccacgaatggccggagttcatcgtcaacgtcaaggaaaccggcaaggtgatgctggtcaattaccaggacatcaagaacctcaccatcaccaccatcgacgccgcaccgttcctgcatgacggcggctgggacagcacccaccgctacttcctcacggcggccaacaactcgaacaaggtggcggtgatcgactccaaggagcgcaccctcaccgccctggtggacgtgggcaagaccccgcaccccgggcgcggcgccaacttcgtgcacccacagttcgggccggtgtgggccaccagccacctgggggacggcggcatttcggtgatcggcactgacccggtcaagcacgcgcagtacgcctggaagcaagtggcttcgttgaagggccagggcggcggttcgctgtttatcaagacccaccccaactcccaccacctgtacgtggacaccacgctcaaccccgacgccaagctcagccagtcggtggcggtgttcgatatcaaccacctcgacaagggctacagcgtactgccgattgccgagtactccggcatcaagcaaggcgcgctgcgcgtggtgcaaccggaatacaacaaggccggcgacgaggtgtggttctcggtgtggaacggccagaccgaagagtcggcgctggtggtgatcgacgacaagaccttgaagctcaagcaggtgatcaaggacaagcgcctgatcaccccgaccggcaagttcaacgtgttcaacacccaacacgatatttattgagcccaatcaacaagaggtccgccaatgaaaaatattctcctcgcactgctggcaaccgccgctgcgttcagcctgcaaccggcgctggcgcaagacgggccggccctgttcaagagcaagccctgcgcggcctgtcatgccgtcgacagcaagctggtggggccggccttgaaggatgtcgcagccaagaatgccggtgtgaaagacgccgccaccaccctggccagccatatcaagaacggcacccagggtaactgggggccgatcccgatgccgccgaaccaggtcacggatgacgaagccaaggtcttggccgagtgggtcctgaccctgaaataaccgccaaggagcgcgccatgaaagtctcgatgatcagttcggccatggcgctgcttctactcattcccatgcccgcaggcgcagtcgtggatgcccaacgattggaacatctgctgacccaggactgcggcgcctgccacggcctgtacctcaccggcggcctcggcccgccgctgacaccccaggccctcgccggccagagccgtgacagcctgatcgccaccgtcacccatggccgcccagcccgtgcgatgccgggctgggcgccgctgctcagcgcgagtgaaatcgcctggctggtcgaccgactcctgcaaggaagccccaccccatgatccgtcccaccctgttagccgcttgcctattgctgggcgcctgtacccaaccgacgttgcgcggcaccggcgacctgggcctggtgatcgaacgtaccagcgccagcgtacaaatcatcgaatccaccggcatgagcaccctggcgcgcatcgaaggcctgggcgatctgtcccatgcctcggtggtgttctcccgcgaccagcgccatgcctatgtatttggccgcgacggcgggctgaccaaggtcgacctgctgggccagcgcatcgaaaagcgcatcctccagggcggcaacagcatcggcggcgcgatcagccaggatgggcgcctgatcgccgtgtccaactacctgcccggcggggtcaaggtgttcgatgccgtcaccctggcccaggtggcggacattcccgccaccgccctcgccgatggcaagcgctcccgcgtggtaggcctggtggacgcgcccggccagcgcttcgtgttcagcctgttcgacaccggcgagatctggagcgcggacttcagccagggcaacgcgccacgcatcagccgtttcaccggcatcggcgagcagccctacgacgccctggtcaccgccgatggccgctattacatggccggcctgttcggtgaagacggcatggcccagctcgacctgtggcacccggaacacggcgtcaagcgcgtgcttgccgactatggccgtggccagaaaaaactgccggtgtacaagatgccccacctcgaaggctgggccgtggccgacaaccaggcctttgtgccggccgtgggccgtcaccaggtgctggtgatggatgcccgcagttggcagcagaccgctgccatcgccgtggccggccagccgatctttgtcaccgcgcggcccgatgggcgccagctgtgggtcaacttcgcctacccggacaacgaccgggtgcaggtgctcgacagtgaaacccaccagatcatcgccgacctgcgccccggccccggcgtgctgcacatggagttcaccgggcgtggcgaccagctgtggctgtcggtgcgcgacggtgaacaggtgcaggtgtgggacccgtatcgcctgaccttgctcaagaccctgccggccttgagccccagcgggattttcttcagcaaccgtgcgcaaaaaatggggtattgaaatggaccttgacctgctcagccgtcgactgatcgaccgttaccagcacggcatgccgctgtgcgccgaaccgtaccgggagatggcccgggtgctcgactgcactgaagccgaactgatggcctgcctgcaacgcctggaactggcgggtgccttgtcgcgcatcggcccggtgttcgaacacacccgcgccggcgccagcaccctggccgcactggcggtgccgatcgagcgcctggaacaggtggcgcagcgcgtcagccagtacccggaggtcaaccacaactacgcacgcgaacaccactacaacctgtggttcgtgctgaccggcccgcaccgccagcacttggaacaggtgctggcggaactggagaaagacaccggcctgccgcccctggacctgccgatgctcaccgcctaccgcatcgacctggggtttgccctgggagaacatccgtgatcacgccgctgaaccacgaacagatgctcgacctgcgccaatgcctggagcgcggcctgccccaggttacgcggccgtatgaggagttggcggagctgatcggcgcccatcacgaccaggtgttgcagcagatgcagcaatggcacgagcaaggcctgttccgacgggtcggcctggtgctcaaccaccgtgccctgggctttgtcgccaacgccatgctggtgctcgacgtgccggacgcgctggtggacgaagtgggcacgcgcctgggccgcgccgtcgggatcaacctgtgctaccagcgcccccggcgtttgccgcaatggcgctacaacctgttctgcatggtccatggccgtgaacgcgaagccgtgaccgcgcatatccaggcggtgttgcaacaacagcagctcagcgacctgccccaccaactgctgttcagcacccgcgcctacaaacaatgcggcggacgtttcgcaccgccgccgtcacaggtatgggcccatggatgatctcgatcgccaactgatcaatcgcctgcaacgcggcctgccgctggtgcgccagccgtggcagcaactggcgcaggaactgcacagccgcccctgcgagttgctcgaccacctgcatgacctgctcgaagacgacgtgctgacccgcttcggtccgatgttcgacatcgagcgcctcggcggcgccttcaccctcgctgcgttggcggtgcccgaagcccgcttcgaagcggtggctgcgcaagtcaacgcgctggcgcaagtggctcacaactaccgccgcgaataccactggaacatgtggttcgtgctggcctgcgccaccgaggcggagctggccgccaccctgtcccgcatcgaagccctcaccgggttggcggtgctcaatctgccgaaggagcaaacctaccatgtcggtgtgtatttcccggtctgacaacgccctggccctgcgcttgatcgccctgacccaaagcggcctgccgctggtggaggacccgtgggcgtggctggccgagcaattgggcatcagcgtcgaatcgaccctggacctgctcaagcgcttgcaggctgaaggtgcgatccggcgcatcgctgcggtgcccaaccactaccgcctgggctatcgacacaacggcatgaccgtgtgggatgtagtcgacgagcagatgccgcgcctgggcgaactgatcggtgcgcagcccttcgtcagccactgctaccgccgaccacgccgacccggttggccctacaacctgttcgccatggtgcatgggcgcagccgcgaagaaatcgacagctaccgtgagcacctgcgttacctgctgggtgaagcctgtggtgctgacgaaatgctggtgagcagccgcatcctgaaaaaaaccggcctgcgcctggccccctcgcactagaaggagtgccctatgctgcggatcagtcagtacttgcgtaccctcgccggccgctgcccgccgccgcgtgtgtctacacccggcagcgaccgcccgccggtggtgatctggaacctgctcaggcgttgcaacctcacctgcaaacactgctacgccaccagcgccgacagcgtgtttcgcgacgagctggacaccgaggcagccctgctggtgatcgatgatttgcacgcggcgggcgtgcgcgtgctgatcctgtcgggcggtgaaccgctgctgcgcgaggacctgttccagctcagcgcctatgcgcgtgacaagggctttttcgtcgccctgtcgaccaatggcacgctgatcgatgagcagaatatccagcagatcgccgacgcgcgcttcgactacgtcggcatcagcatcgacggcctggaggcaacccacgacgcgtttcgccaactgcacggcagcttccagcgctcgatgcacgccattcgcctgtgccgcgaagccgggatccgcgtggggctgcgcaccacgttgacccaggccaaccacgcgcaactgccgcagttgctggcgttgatgcgcgcttacgatgtgcagaagttctacctgtcgcacctcaactacagcgggcgcggcaggcgcagccgcttgctggatgcacaccggcagatgagccgtgacgccatggcgctgattttccagcaggcctggcatgacatcgaacagggtatcgacagcgatttcgtcagcggcaacaacgacgccgacgccgtgctgttgctgcagtgggtgcaccagcatctgcccgagcactacccgcagctcgaacacttgctgcatggctggggtggcaatgcctcgggcagcggcatcgccaatatcgacaacaccggcgaggtgcacccggacacctactggtggcagcactcggtgggcaatgtgcgcaacacccgcttccgccagctctggctggaccagcccgacccgttgctgctgcgcctgcgcgaacacccgcgccgcatcggcgggcgctgtgccgagtgccgctggctggcgatctgcaacggcaacacccgcacccgcgcctgggccgatggcgacctgtgggggccggaccccggttgctacttcaacgatgccgaaatcgcccggcatcccacaccgttgatcccttgcaccacccggtgacacaaccgggggcgcctacctgatgatgaaccaaggatgtctcatgcacacgccaaccgccctacccgccagtctgcacagccccttccaccccggtgaagttgccttggtcggcgccggccccggtgacccgcgcctgctcaccctgcgtgcctggagcctgctgatgcaggccgacgccgtggtgttcgaccggctgatcagcgccgagctgctggcgctgatccccctgagctgcgcccggcattacgtgggcaaggccagcggctaccacagcctgccccaagaccaactcaacgcactgctggaggaactggccgagcagggtcaacgggtggtgcggctcaagggcggcgacccgttcatcttcgggcgcggcgccgaggaactcgaatacctgctggcacgcgacatcccctgccaggtggtgccgggcatcaccgccgcctccggttgcagcgcctacgccggcatcccgctgacccaccgcgatttggtcaactcctgtcgcttcgtcaccggccacctgcagcgcgacggtgccttgaaactgccgtgggccagcctggccgagccgagccagaccctggtgttctacatgggcctggcgaacctggcgctgatcgccgaacacctggtggcagccggtctgccggcggatacccccgcagcgctgatcagcaacggcgcccgcgccgaccagcacgtggcgcgcggcaccttgcgccagttgccaaccctggccgccgactgcgaaccgggcgtgcccaccctgacggtgatcggccatgtggtgaacctgttcgccgacgccaccctgcattaccccgccagcctgtcggcaccgcgcgtcccggtggcggtatgaaacacctgctgctggtgccgttgctctggatcagcgcggcccatggcacgccggccgaggattacagcaagtattgccagagctgtcacggcctcaaccgcatcggcgccagcggcccggcgttgctcccggaaagcctggggcgaatcaagccggacgaggtgcgcaaggtcatcgaacaaggccgtcccgccagccagatggtcgggttcggctcgcagttgagcgccgcacagatcgacggcctggcgaacttcctgcaacagccaccggccacgccggccacctggggcgcgcaggacatccgcaacagccaccgcctgctggcagatctgcgcacactgcccagcaccccgcagcaccacgccgacccgctcaacctgtttgtggtggtggagtccggtgaccatcacatcgacattctcgacggcgatcgcttcaccgtgctggaccgcttcgccagccacttcgccgtgcacggcgggccgaagttctcgccggacgggcgcttcgtctacttcgcttcccgcgacggttggatcagcctgtacgacctgcataacctcaccctgatcgccgagacccgcgtggccctcaacacccgcaacctggcggtgagcaaggatggccgctgggtgctggtgggcaactacctgccgggtaacctggcggtgctcgatgcgcgtgatctgtcgttggtcaagaccctggagacgggctcgcgggtcagcgcggtgtacaccgcaccgccgcgaaacagttttgtggtggcgctcaaggatgtgaatgaggtgtgggagctgtcctacgcggcggcgcaccccacgtttgaaccccggcgtatcccggcccacgatgtgctggacgacttctcgttcaccccggattaccgccagttgctcgccacctcacgcaaagccggtggcggccaggtgatcgacctggattcgggcacggtggtcactgacattccgctggcgggcatgccgcacctcggctccggcacttactggaagcgcgacggcaactgggtgttcgccaccccgaatatcagcctggggcaaatcaccgtgctcgacccgagcacctggacgctgatcaagcagatccccaccctcggcccgggcttcttcatgcgcagccatatcaactcgcgctacgtgtggagcgatgtgttcttcggcccggataacgacgccatccacctgatcgacaagcagaccctgcacatcgcccacaccctgcgcccagtgccgggcaagacggcggcccacgtggaattcacccgggacgggcgctacgtactgctgagtatctgggccaccgacggcgcgctgatcgtctacgacagccagaccctcaaggagatcaagcgcctgcccatgaacaagccatcgggcaagtacaacgtgggcaacaagatcgagtttgccgagggcacgtcccactagtttcggccaaacagacccaggccgatgcggctgcaatcaccgtgcagggtgaacccctcttcggtgcgccgcaatcgaccgcgctcctgggcctgggtcagctcatcatcgccacgggcaaactggccgaggcccaggtagtgataaccggctgcttccaggcgctcgacacacaacagccccatggcggtgctttgtgcggcgcagcacagcgcctgcgggcattgccccgcgtatcgcgccggtggccgggcatagtcgaatacctgcacgcggtcaggctccagcgcgatcaggctggccaacttcgcctccaggctggccagggtctgccaggcgttgccgtagcccagatcgacactgaccgaacggaacccgaaggtgcgcgccgcatcgatcaacgactggatcggtgccggatcgcgataggtgtcctgggagagagggtcctcggtacaggcatccggcacaccgatgcacacccggttgaaacccagttcgcgcaaccggccgacgctggcccaatcactgtgctggggcgccaggtcgatggcgtagtcgccgcggtcatgctcaaggaaatgcaagcgctcgcgcagccgctgcatctgcatctgcacatcgccaatgggcgctgccccacgccactggaagtgctcaaccggctggcgactgcccaggccgccaccgatcaggcgtatctgctgcgccaggctgcggcggtaaacggcactcggcgtacctggccagtgcagggtcactgccagtggacgctgccgttggcggctggtgcgcaaagcacgggcgacatcgagaggaatgacggtgtgcatggcgggctccggatccggcgacgatgcgccattgtccggtgcgacgccacggcgcaccttgatgtgcatcaaaggctttaccaactgaggtaaaacatgcccttggccagcagcacgatggcgaccatatgcccgaacaggctcagatggataaagcgcaggtaagccgcactcacccggccacggcgcatgcgcagcatcgtcagcagaaagtgcagcagcacactggcggcgaggatcagcttgagggtcaacaaggtgccgaacgacgaggcgaacggcgcggccaacaccggcaggtaacgcaacccgaccatgcccagcccggcgccgaacagcaccagcaacacccacggcatcagcgcccgggcacgcacgccgataccttgctcgacctgcagcatcacccgcgccggcaactgccgatgcagaccgcccaggatcagcacttcgaaaaacactgtgccgatgaagatcagcgcggcgaacagatgggccagcagaaacaacaggtaaagcatggtggcctcgcaggtggcgtcaaggtgccagtgtgacgccttgacgccacctgatccttgataccgatcaagctaaacccgcacgccgagcatgccggcagtgatgatcagcgtcaccagcgcaccgacgccgatcaccgcccacgtcatcgtcgcacaacgcgcctcgctcaccccatggttacgcagcacgccgcgcaggccacaccccaggtgcgcgatcaacaggaacaccgccagggaataatgcggcaccagccggatgctccaggcatcggccagcaaccccactggttcggccacggcccaggcgtaatcggtgtcggtgccgaagtagcgcgccagggtaaataccgagttgatatgggaggctataaacactgccaggtaagcgccagacgcggtctgcaaggcgtccagcaggtcggcgcggtggacggttttggggcggatcagcaccaggccgctgagtatctggaaaaagaacgtgacgataaggatcggctccagccaaccgttgcgatacaccacccgcagcacttgcatcaccgcacgatgcgcatcgttgccgaaaattccgagcagatggttgaacaggtgcggcgccaggaacaccatcaggatcgccaccgacgcaatgccatgggcgacccgcagcttgatgtaggtgcgcgggtggtgggtgaagtcaatgctgggcagcgtggccgacaccatcgagaagtaggcactcactgccaaccacaggccgctccacacgacaaggtcgtgaccattgaccttcatcaggtacagcagcacgcccatcagcgtataggctggcggcgtggcaacggccaggcaggccaggcgcctggcaagcaccaggcgtgcactcatcatgggctgcacacccgtgacgaacacgcagtagaacgccaccaccggcactgcataggcactcaacatcagcgccagagtcaccggcccgccggccccgccaacatgggccaggttgctccactgcagtgcccaggggtaatagagtgcggcggcgaatggcagcagccacagccagtccaatcgggtgtgggccagcggttttgcgagagacattgttgcgtccttactcatggattttcccccgcgaccctacggactggcgcgagggaaacccaggtccaattccacgctttttgcctacaccactgcgcgttacagcaacgggatgctgtagctgacaatcaaccgtgtctcgtccttgtccgccgtgtcattgccgcgcaataccgcactgcgccaggtaaaccccaggcctttcaaggccccggtggggatcacatagtccaggcgcaggtcgcgctcccattcgctgttgtcgcggccggcggtgcggatatggctgccgtgaatgtaagtcacactggagcgcagccccggtacgcccaggctggcaaagtcataggcataactgcctaccgcggcctgttcgccggcattcacgaacttgagcgactgggagttggtgatcaggtaaagcgaacggccctgcccctggttgatgtgcgggaagtcactttgcccggtggttttctggtagcccaggctcagcgaatgcccgctcaaaccataggtgaacagtacgctccacaagcggttgtcgacgttgccggtgttgacgccgggcgcgtagtaacccgagccgacataaccttcgccacggcccgaagcactgccgttcttaccgtcggcggtgctgtagaaataacgcaggtcgctcttgaactgccccaccggcagttgccaggtgtgcaccaggcccaggaagtgctgttggtagaagttctccaggctggcgtagtagtactgcatctgcagttgcttgctgacggtgtaatccacgccgccgtagtagaactggttactggacttgcccttgaccgggtcattggcgccggcaatcgacaggccttgggcattgctggagttgcggtccacgacctgctcgatcttgcccgcgatcaggttgacgtccttgaagtccttggactccacctgatagccacggaaggtctggggcaacaggcgcccgtcttcagtggtcagcaccggcagcctgggcatcaggctgccggccttgagttgggtctgggcaatgcgcagtttgccggtaacgcccgtcttgctgaagtcatgggcggccttgccatcgtccagcgggaagacgctgccgggggtgttatcggcaccggacttgccggcccggccggaggcgtccaggcgcaggccgtaccactcttgcaggtccaggcccaggccgaccgtgccttcggtgaaaccggactggtagttgaacataaaggcctggccccattccttgtccgaggcggccttggcgttgcgggtgtcctggttgtagtagaagttgcgcaggtcgaggctggctttgctgtcatcgataaaacccgacgcagccgcctgctgcgcagcgccgatagagacggcgagcgccaggcaagtcttgtggttcatgaaggctccgagaagtgattgaggcgccccgtcgcagcgctgtttttgttgtgcctgggggctgcagtcaacgggagcgcgcacggtatagcgttgcgtggccgggaaaaagccggcaaaaccgccaatcactttttcagtttgggtaacaatccagcgaatggcgagcgcgtgtccagcagtgaggtacggatgaagtgcaggtaactttccacccggcgcaaggccgaggtctcaaagtgcgcttcgaaaggttcgacggtgtcctgcacgcactcgatcgcgtgttcgacgcgtgccagtgcacgttgccaccgtgcatgccccggctgggtgaacaagcgcaccaatgcccgccccatggcacgtaccgcctggcgccacgcggtggtttcggcgtagcaggccagcgccggcaactgcgcctgctcgcggcgcagttcgatcagggcatggccgacgtcaagcaccacgaacgtccagcgcagcaggcggtgttgcacctggggctggccggcggacaagccatgggcctggttaagcaggtcacgggtgccgctttcgaaacccgagcccagcgccggcaagggtgcgtggagggcgaacacgacccgctggcgcaggtcctgttccaaccgacgccacaaccacgggctgttgggcggcagaatgatcgcccctgccgccgcgcacaccagcatcccgaacaccatggcgaggtagtcattgatcaagccataagggttgtagagcgtgagattgccgggcaccgaactggtgccgaaaaacaccagcatgcccaggccgtagcccgcccactgtggtttggccaaccaaaacgaccccagcatgatcaccggcgcaatcactaggcacagtaacgggaacccatcgatccggggatagacgaagaacacctcgaaaatcccgatgaccgccgccaacaccgtcccacaggcaatctggaacgacatgcgccgggggttgggggagaacgccgagagccccaccgtgagcgcggacaccagggtcatcgccgcgccactgggccaactggtagcgatccacagcgcacacaacaccagcagcaccactgcggcacgcaggccggcgcctaccgctgccagccagtgggtctgtggctgaaaaggctcggcccaacgctcacgccggtggctgtgatcggtcagggaagaatgggtctgggcgtagctgtacaactcgtcgacgaagcgataaagcaactcgcaggccgtgtgaaaatccagcaagtcatcgttgggcggatgcgccagcaacagctcggagcgcaggtggcgaacctggctcggcagcccgtggatgtaacgcttcaggtgtgtcgacaggtgcgccgcatccaggtctgtgagtacctggccggcgaagggttgcagcacactgaccagcgccctgagcgccgggtccaccgcgttcagcaccgccgtggcgccgcgcatctgcactcgatcgagcaactgatgcaggacattgaaacgcgtggtgatggccatgaactcgacgttgagccgatccaggcgccccttgcgtcggcgcatgtaagggtcttcgaacacactgacgctgcgcatcccttccaggcccactgcctcggcgatgaagcgcaggttggcgacctcgaacgccgcctggtcgtgggtactgcgcagaccgctcacgacaaatccggcgaaacgaccaaagcgttggtacagggtattgcgcatggcggcgcccgccgtattgggcagcaacgttgcgctgatcccggtggcgcacagcacgcccagggtgatctccaacacccgccacaccgccgccatgaacacctgctccgggtgccccaccaccggcaagcccaccatcaccgcggtataccccgccagcacccacccataggcgcgaaaatgacgattgcgcgccgcgccgtatgagcacacgcccacccacacggccaacccggccaggaacagctcggtgctctgggcgaacagcgccatcaacagcaccatgaacgacgaccccaccagcgtgccgatcacgcggtagacgcttttggccaggacatgcccgctgtagggctgcatcacaatgaataccgtggtgatcaccgtgctgggctgcggcaattccagacgcatcgaaagccacaaggccaggtacgaagcgatcagcaccttgaacaggtagacccacatcaccccgtcggtgcgcgcccattccaggaagccccggcgccagggcagtgctctcagccggcgtgaaaaatcagtgagtggcggcacgaaacagggactcccgacaagctggctggcacacaaggccggcgactttaggcagttgcgccagggtcggtaagtcatccagaacgtgaatgactgttacgcaaaacaccacaataaatagcgtttacagcggcccgcgacttcatgccacactggaaaaatccgttatccctggtagccatcgatggacattctgcagaacatgcgcatcttccgttgcgtcgccgaagccggcagttttaccggcgcggccgcgcggctcaacaccaacaccacccatgtatcccgctccatctccaacctggaagcacacctgcgcacgcgcctgttcaatcgcaccacgcgccgcatcgccctcaccgaatccggccaacgctatttggtgcgatgcgagcagatcctgcattcgatcgcggaagccgaggtagaagccggcgacgcccatacccggcctatcggccagctcaaggtgcattcgatgaccggcatcggccagcattacgtggtggacgccatcgcccgttatcgccagcattacccggatgtgaccttcaacctgagcatgagcaaccgcacgccggacctggtgcacgaaggcttcgacgtatcgatcgtgctggccatcgacctgcctgactccagccatgtgtcgcagaagctcggcagcacctacagcatcgtttgcgcatcaccgtcctacgtaaaaagccacggcatcgcgcaggttcccaaggacctgctcgaccacgcctgcctgcgcctggtcagcccggtgatccccctcgaggactggaccttcgacggccccaatggcaaggaaaacgtgatcatcagccactcgcccttcctggtggattcggttgacgcgatgaaaaccgccatcagcaatgacatgggcgtcggcatcctgcccgtgcatgcggcgatcaagggactgcgcagcggcagcctggtgcgcgtactgcccgagtaccgcctggaggagctgagcctgtacgccatctacccttcccggcattacctggacgcaaaaatcaaaacctgggtggagtacctgcgcagctccctgccggaggtgctcgccgaccataaggctgtgctgaagacccgcccgttgctcagcgctgtcgagtcataacgactacatagggtcataacgactacaggacgccagggtcataacgacaacaaaaatcgcaaccgactgattttcataatgttattcattggcatgctttctgactctgaagtgggcaggacaaatcttcgaaacccacagagagatcactatgagcaatgaattcaaccagcgcctcgccgtcgtcaccggtgccagttcaggcatcggcctggccgtcacccaacgtttgcttgagcgcggcgcgaaggtggtcgcgatgtcgcgtcaactgggcgggcttggcgtgttggccgagcagtttggcgagcagctcaagtggttggccggggatgtgaccgaggcagccgacctggcgcgcctggcgcaggtgacggcgccgatggggcctgtggatttgctggtgccgaacgcgggcattgcccaactggccgatggcctggacctggccgccttcgaccggcaatgggcggtcaatggcgccggcgccttgaacaccttgggcagcctgcgcgagcagttgtcggcgcaggcgtcggtggtgttcatcggcacgttcctggagcaagtgacctttcccggcctggccgcctacatcgcgtccaaagccgccctgcgcgcccaggtgcgcaccctggcggtggaactggcgccccacggcatccgcctgaacatggtctcccccggccccaccgccacgccgatctggagcaccctggggctcaatgatgaagccctgggttcggtggcgaagaccgtcaacgcccgcctgctcgacgggcagttcctggaaccgggcgccgtggccgatgtgatcctgttccagctgggccagggcgcacgcagcgtgttcggccaggactgggtggtggacggcggctataccttgcgctgatcagaccagtgcaggcatggccttggcacctccgaatgccagggccttccaaccgatcaccaacagcgacaacccggcaaagatcagcccgcagccaatcaccccggtggtgccgaaggcattgatgaacagcccgcccaccgatgacccgatcaccaccccggcattcgccgatgacacatacaggctggtggcgaactcatgcgcctcgggtgccgaagacgtgagccagacttgcgtgaccaccaggccacaggtatgcgccgcgccccagagcaacacgatcacactcatcgacgcccacgacaggctgccaaaggcatacaacaccaggtatgccgccgccagtaccaccggatacagtacggccgtcacaaccagatgccggctgagcgcacgccccacccataggttaccgacgacgccgccgatgccgaagaccaccagcatgacactgatggtccgaccgtccatgccgatccgggtcttgaggtactcagccgcgtagctgtacaccgaaaacatcgtggtaaacaccagcacggtggcgaggatcgccagccacaccgagaggctgcgcagcacagtcagttgcttgccgaagctcaggggtgccgaacgcgggtgatcgggcagcttgagccttagacccaacgccgccaccgccgttgccacggcgcaaaagtagaacgaggcctcataggaaagactcgcccccacccaagtggtcagaggcacgcccaacaccagcccaagcgtggtgcccaccaccgccagcgccgtggcatgggccgctcgttcgcgggggtacagcgacaccgccgtggaaaacgcagcagcaaaaaataccgggtggagcatggccggcaccacgcgcagcgccatcagtgtttcgaagttcggtgcaaacgccgacaacacactgctgatcgagaaccccagcaaggcgcccaccaggattttcttgcgcgccacccgcgaggccaacaacaccaggaacggccccagcaccgccacgatcaacgcaaacaaacccatcaaccacccggcctgagacacactgatcgcgaaccgctcgacgatcatcggcaagataccgaccaccccaaactccagggtatacaggccgaacaaccccaggatgatgtagatcacgagccgacctcgatcacaaccttaccgaaggcaccgcgctgcaaatgggcgaaggcctggggcacttcggcaaagcggtaggtgtggtcgatcaccggttcgagggtgtgtcgctccaccatgcgaaccaggtcttcgagggcacggcgtggccccaccgctacaccgacgatggcggcgcgcttggccagcaggctcatcagcggcgcgctcaactggtcgctctccagcaggccgatcactgagacacgcccaccgttgctcaccgcttgcagtgaacgcgccaggttgtcgccaccggccatttccagcacgtgctcggcgccgcgtccgccggtcagttccagcacggcgtggtgccagtccggcacccggccacggtggatgccatgggtggcgcccagttcgacggcacgggcgattttttcatcgctgctgctggtgataatcacacgggcaccatgggccgctgccagttgcacggcaaacagcgaaacgccgccggtgccctgcaccaccacggtctggccggcgtgcaagtggccgagttcgatcaaggccatccaggcggtcaatgccgccaccggcaaggtgctggcctgggtggcgttcaacgagcgtggtgcgagcacgcaccagtcagcgggggtggtcacgtattcggccagcatgccggggatcgggccgccttgcggtggcgcgtcggcccaggacaacggcctgccgtcgacccagccggcaaagaaactcgacagcaccttgtcgcccaccttgaaccggttcacaccctcacccacggccaccaccgtgcccgccatgtcggacgccggggtgaaggggaattgcaggctggcgcccatgccgttttccgctacctcggcgtcacggtaattgagcgataccgccgcgacgcgcaccagcacctccccggccttgaccaccggtcgcggcacacgggccaagcgcaaggtatggaggccaaaggtcgggatttcccagcgttgcatcaagtcagtcatgttcaggtctctcgtgagggttttgcgcaaggataagaacctcgcttcacgggattaagtagggcgcggctcctgggtctacggagctttcattccgcaataccggcaattgcgctagggtatcggcaattcccgtcgccaatcggtgcctcagatggacaacctcacgaccctgaatgcctttgtgcaggtcgcgcatacccacagttttgtcgccgccgggcgggtgctcggggtgacggcgtcggcggttggcaagagcgtggcgcgcctggaagaacgcctgggcgtccggttgttccaccgcagtacgcgcagcgtgacgctgactgccgagggcgagctgtttctggagcgcagccggcgcatcctgcgggaaatcgaggaagccgaggcagagttgtcccaagtcagccaggcgccccgtggtcgcctcaaggtcagcctgccgttggtgggccatccgtttttgccagtgctggccgacttcaagcaggcctaccctgacgtcgagctggacctgagcttcaccgaccgccgcgtggacgtggtggaagaaggctacgacgcggtgctgcgcagcggcgaggcgccggattcgcgcttgagttcacggttggtgggggagtatcggatgatcgtcgtggcggcccccacctacctcgaacgtcacggcacaccgcagcgcttcagcgacctggcccagcacagttgtatcctgttccgctttcccaataccggcaagttgcagcgttggccgttgcacgcacaaggcgtcgaactcgaccagcacctgccggcagcgatgatctgcaacaacctcgaggcccgggtatgttttgcactgcacggcattggtatcgcctacctgccggacttcgccatccgcgaggccctcgacagcgggcaattgctgcaggtgctgcctgactgcaccgagcacggcagcttccgcatgatgtggccgtcgagccggcacccgtcgccgaagttgcgggtgtttatcgactttctcaaggaacgcctgtttccctgatcaggcgttgtcgaaccgctgccgcgcctggcgaaattcatcgcccttctctaccacccaggtccatagcgggatcatgtgtaccagcagttccgtgcccaggctcgacagctcgtactcgaccctgggcggcacttcctggaagtcatggcgcagcaccagcccatcgcgctccaactggcgcaacgtacgggtcagcatgcgctgggtcacgccctgcatgcgccggccgatctcggcgtgacgcaagcggccggacacacccagcacgtgcacgatgcccaatgaccagcggttgcccgcgtgggtcagcacctcgcgcttgaggccgtcatcgtcggcgctgagggcgtcgcaggcggcttgggagcggcggatgatctcgtcgttatccatggggagctctcggtatcacgggtgtgccttcttatgcgcggcgatgaattctgcaagcatgccacgactttcaatccagacggagttcctatgaccccctcttccatcctggtactcggtgccggcgaactgggcatggccgtagtgcaagcactggccgacctggccgcaccgggcgaaacacgcctcgccgtgctgctacgccccgccagcctgcactcggctgcggccaacgctttgcgtgcgcggggtatcgagcccgttgccggtgacctgcagaacgacagccaaagcgtgctcgccgagcgcttcgcgcccttcgacacggtgatctgctgcaccggttttgccgccggccccggcacccagcgcaaactggcacgggccgccatcgagggtggagtgcggcgttacgtgccgtggcaattcggcgtggactatgacctgatcggccgtggcagcccgcaggataccttcgacgaacagctcgacgtacgcgacctgctgcgcgcccagcacggcacgcaatggctgatcatctccaccggcatgttcaccagttttctgttcgagccctcgttcggcgtggtcgacctggcgcagaacaccgtgcatgcgctgggcagttgggacaccgccgtcaccgtcaccacgcctgaggacatcggccggttaaccgcacacatcgtgcttgccgaaccggcgctgggcaaccaggtggtgttcactgccggtgacaccctgacctatgggcaactagccgataccgtcgacgccaccctcggcatccggctgcagcgcgagccctggccggtgccgaggttgctggccgaactggcgaaggaccccgatgacaacctgaagaaataccgcgcagtgttcgcccaaggccacggcgtggcctgggaccccgccgtgaccttcaacgcccgccatcacatcgccatgacggacgttgccacgtggatccgccaacacctcagggcaccggcaaccatccgctgaattcaccccggttgttcaatgggcaccaggcgaagtccttttgcgcgccgggcaatacctggggttcgaccgccgcgcacggtgcccctttccaatcaaacagggttgcgccctgccaggccaggaccacacccctggcctggcttttatccgtctgcacccaacgtgcggcagccgccgccatgaacgcctcgatgggttcgtcatcgatctgcgcccgatactccgagcccagcagccagcggcagacgttcacgtggtaggtccaatccagcggcggccggtggcgataggcccaggtcatgaagctgcgaaacaggttcaggccctcgggcgggtccagcttgagcagcgccgggcagatgtcgaacagggtgtgccaatacggcagcaggcgtgcatccaggtgcacgaaactgcgggaattgctggggtattcaggcggcgccggttccgcgtgcaggcggcgggacgccttgctgaccaggcggcgggcgcctgcgggcaacaggtggttcatgaaacgcactcacagtcatgacgatgggacgcctcctggtttcaggaagcccaaggcaaacgtcagcgtgcaggggaagcgcgagggttggccgagggccaggaatagcgtggcggcgccttgttgcgccgttcatgggccgggcgcggggcgtgtcccaggcccaatagccaggccaggccgaccaggaacaccagggcaacggtcaatgcgttgcagaccgggcaggcaaagtagttcgagatgttgctggaagacgggctgcccaaccctttgtcggaaagtggcgcctggttgccgctcaccgaacagaacgccccgccgatgccattgagcgcctgccccgtcatctgcccatgccccaaaccgcagacgaacaggttcatgagcacgcagaagtacagggcccaggcgatcagcgaacggtcggggtggctcgatttcatggcggcgactctaccaccagcgccgcaaaaggatgaagcgcgacatgcccctgtggcagaacgtcgcagattacgtgggcttcccagggttggtagactgggcgccctcaaagcctgacgtattgatccagagcaatgcaggcgcttcacaggatgcacagttgatgagtacgttattcacccgccgcaaggtgctgaccggtatgggcctgttgggcctgggcagcctgctgggcggctgtgactacagccccaagctgaacttcaagtacggcaaggacctgagcgacaagatcatgggccgcaccttcaagctcaagaacaccgacggcgaaaccgtcaccctgagctcgttccggggcctgatgccggtggtgttcttcggtttcacccagtgcccggccgtgtgcccgaccaccctggcgcgcgccgcccaggccaagaagctgatgggccgcgacggcgaaatcatgcaggtggtgttcatcaccctcgacccggaacgcgacacgccggagattctcgacaagtacgtcaaggccttcgaccccagcttcgaagcgctgtacggcaccccggaagaaatcgccgtggccgccaaggaattcgggatcttctatgaaaagatccccgccggcgacacctacaccctgtcccacaccgccaccagtttcgtgttcgacacccgtggcaacctgcgcctgggcctgcaggcatcccttaccgctaaagagtgcgcagaagacctgctcaccgtcatggaggtctgctaatgactgccgttcaacacctcaagcgcacccttatcggcatgaccctgctgggcctcgccgcgcacgccagcgcccaggtgcaagtcaccgacgcctgggtacgtgcgactgtgccaggccagccgtccagcggcgcgttcatgaccgtcaccgccgacagcgacagccaattgctgagcgtggcctcgccggtggccaaggacgtgcagatccatgaaatgagcatgaaggacgacgtgatgcgcatgggcccggtggactcggtggccctgccggcaggcaaggccgtgaccctcgaccccgacggttaccacgtgatgctgatgggcctgaccggccagatcaaggaaggcgaccaggtgccgctgaccctgaccgtgcagaacgccaagggcgagaagcaggcgattgaagtgaaggcgccggtacgtggcctggatgggatggaccatggcaagatgcactgagacgtgcgcacccgcctcaatccacgataaatagccttgccccggcactcgtcgaagatcgatgcccttccatgtcattgcccacctggtaactcatcccggccgtcagcgtaaactgacggccgtcttccagttctgtgtgcaactcgccttcaaggcataacagcacatgcccccgccagcaccaatggtccgccaagtagccaggcgtgtattcgaccatgcgcacacgtgttgtgccgaagtggcaggtgcgccacagggcattgccagtgatacctgggtgaatcaccggttcgaccgtggcccagtctgtggtgccaaaaggaacagcagtgagatccatggcgagctctcgcgttgattgatgtgacttgaggctattcacaagacacggtggacggtagacacagatcgacccgttttacgggatacaggtatcctgcccgcacagagctcacggacacgctgatgcatatcgaccctgcctacatccttcacgaaaccgaacactggcggctcaaccatcatctggcatctgcgttgcccggctacctgatgctggggggcaaggcgccggtccactccctggctgacatgccggaaccggcgctggccgagttgggcgggctgctggcgaaggtccagcgggtaatggaggcgcagttggagccgaaatggctgtatatcagccggtatgggcacatgccgggcttcccgctgcatttccatttcatcccggtgtatgactgggtggaggatgcgttctggcgggatgagcgctatcggctgttacaacgctttggcactgcgcagctggcgcagaccgatggggccgagttgaccctgtttgtctggcgggagtttggcgagagcactacgcccccgtcgatccagggggcgtcagtcgagcaggtgattgctcgactgggcgcggctttcagggcactgtaaccgtcctcggctttgccacacgtccacagcatcctttgctcgcggggtggcacgtgttatctccagcatttcccactccttccatgaaatcatcgtgccattagcacacttgtgctaatcgacccctcccccctgcggcgctatattccccggcacttccaacgttccccaggcaccgtgcaactattgcgcgtgggcgtgttgtgcgctggaaaaaccataacaaccccaaggaagaagcaccatgaaactgcaatcctccgttacccgcctcaccctgttgggcgccctgatcatcggcgtggccggctgcagcaacatcaagcccaccgaagatcacctcaagacgctgtcggagaccaacctgggcgaaccggtcaagcgtatttccaatgtgcgcagcgactcgatgaccacctactacgtcgccagtgccgcctccggcgagtacaactgctcggtgcccagcggtgccagcggcggcatgttcgccgtggccagctttggcatgatgaaacctgcggcctactgccaacccaaaggtgcacgcggcaacccgctgcagggcttcacccagtaaccgtctgctggctcaggtcgcgcaaggtcccgcgcagttcggcgggacgcaccggcttggagagaatggcgatctgacggtcgtgcaaggcggcctggattctctccacgtcgtgcccggtgagaatcagcgcagggacgccccagccgcgttgctcgcgcagggcatcgatgcattcgatacccgtggcgtggttgcccaggtcatagtcggcgacgatgatgtcgcaatcgctgaccagatcacgccccgaagactcggcctgcaccgcgcaaccccagcgctccagcagggcctgggtggcgagcaggacgttatggtcatcttccaccaggcacaccttcaacccggtcaacagcccggcctggcgtgtgtcgtcgcgcggtgccgtggcgcgtggcgcggtggccagggtcaagccatacaggcttacagaagtaccatggcccacccgagagcgcaggcctacttgcacccccatcaactgccccaggcgcttgacgatggacagccccaggccgacgccttcgacgtccttgtcacgcaggtggcgtacccgatagaactcctcgaagacctttgacagatgctcctcggcaatccctcgcccccggtcatgaatctccaccgccaagccgccgtcgcgaatgcgcacgccgatcagcacaggtcgttgcgcgccatatttgaagcagttggacaacacgttctgcaccatggtcgccagcagcgcagggtcgaccagcacccaatgcgtgcagggtcgcaggcgcagctccaccccggcccagcgcgcggcctcggcgttctggcgcaccaggtcggcaaggaactcgcccagatgcaccgcctggtacttgggcagcaggcgaccgttgtcgagggtgtagagatcgagaatcgagcggaacaattgcgatacgttgagcagcgaacggtcgatgttatccaccaggcgccgctcttcatcacccagccgggcttcgcgcaggcaggcggtgaacaggccgatggaatggatgggttggcgcaggtcatggctggcctgggcaaggaaacgggatttctccaggttggcggcgatggcctgctcggaggccttgcgcgtgcgctccagcaggatatgcgcgtacaccgggatcaccgtgctggtgatcatcaacatcagcaccatgaagggttgcgcctgccacaccggcgtcagccgatacacgatcagcagtgccagcaaggccagcgccgtggcaatcgccaggtagcgcgagccgtagcgcatgccgttgcccaggttgacccacaccatcaccgcatacaacggcaacgccgcttcaccgcctaccaccatgccgaacgaggtgccggtgtagtcgtggatcatgccgaagatccgccgcgccgggtaatgccccggccagcgcacgatgacttggcgcaaggcaatggaggcgagcaggaacaggaagatatacaggatcaccggcaggtaggtgtccaccgactgtcccggcaggaagcccaatgcaccgatgtagacgattgcaatgctggcgaccacgatacgcagattggcctggtcgagttcggagttggtctcaagactcatggggttacgtccttgtgcggcaatcatcaattccttcacgcaccgcaggcaggcccgaggcacggtggtaaggtagcatgcaacggcacaaccttgccccagggaggagcaccccatgaccggccgtatcatcatcgccgatgaccacccgatgttccgcgaaggcatgctgcgcaccgtgcagcgcctgctgccggacgcgttggtgcaggaagccggcgacctcgacggtgtgctcgcgctgatccacgaaggcggcgagatcgacacgctgatcctcgacctgcgcttccccggcctgacctgcatgagccaactggccgaactgcgccagcaattgcggcgcaccacgctgatcgtggtgtcgatggtggacgacccggcgctgatcgatcaggtcatggccctgggcgcggacggcttcatcggcaagaacatcgcccccgacgagatcggccaggcgctgctggcgatccgcgaaggtgaagtgctggtcaagttcaccccctccggcctgctgccactggacacccataccctcaccgcccgccagcaagacgtgctgcgtctgatcgcccagggcaagaccaacaaggaaatcgccaaggccctggatatctcgccgtttaccgtgcgcatccatgtgtcgtcgctgctgcgtacgctaggtgtgccctcgcgggcggcggccgccgtgaagtatgccggagagttccagtgacaagccgtgcgtgagcccctctgcatccgatatttatgctcacttcccagcttaataatattttatttataccccccctccccctagccttgaagtcatgccaacgctgaatccaactgcattacgcaaggacagagacatgactgaagcactcacaaaaacagacacgctggtggtgggcgccggccaagctggcgtggccatgagcgagcatctgagcaaacaaggcgtgccccacctggtactggagcgcagccgcatcgccgagcgctggcgcaccggccggtgggattcgctggtggccaacggcccggcgtggcatgaccgctttcccggcctggcattcgataccgtcgccccggacgggtttgcgcctaaggagcgcgtggccgattactttgaagcctacgcgcgcaagttcaacgcgccgatccgtaccggcgtcgaggtgctgtcggtggtacgcaatgtcggtcgccccggcttcaccgtgcacaccagtgaaggggtgatcgaagccaaccgcgtggtggccgcgaccgggccgttccagaagccggtgattccggccatcgcaccaaaagaccctgcgctgcatcagatccactccgccgagtaccgcaaccccgcgcaactgccggcgggtgccgtgctggtggtgggcgctggctcatccggcgtacagattgccgatgaattgcagcgctccgggcgccaggtgtacctctcggtcggcgcccacgaccgtccgccccgcgcgtaccgcaaccgcgacttctgctggtggctgggggtactgggcgagtgggaccaggccgcgatgaagcccggccgcgagcacgtgaccattgccgtcagcggcgcacacggcggcaagaccatcgacttccgcgagctggcccaacaaggcatgaccctggtgggcctgacccaggcgttcaagggcagcgtcgccacgttccagccgaacctggtggaaaacctggcacgcggcgatgagaactacctggccctgctggatgccgccgatgcctacatcgaacgcaacggcctggacctgccccttgagcccgaagcccgtcgcgtcttccccgatgcggactgcatcaagaacccgctcctgcaactggacctggccaaggccggcgtcacctcgatcatctgggccaccggttttgccgtggactacagctggttgaaagtcgcagccttcgacgaagccggcaagccccagcaccaacgcggcgtggccagcgaagccgggatctacttcctcgggttgccttggcaatcgcgccggggttcgtcgttcatctggggcgtctggcacgacgccaagtacgtcgccgaccacattgccatccagcgccaataccttgaataccgcgaagccgccccggtggttcgcccatcccctgtcaacgcctgagccttattgccggagttttcctgatgcctactcacacccgtatccgcatgttcaacacgaaagaaacctaccccaaccagagcctcgacaacgacctgtgccaggccgtgcgcgccggcaacaccgtgtacgtgcgcggccaggtcggcaccgatttcgacggcaacctgatcggcctcggcgacccacgcgcccaggccgagcaagcgatgaaaaacgtcaagcaactgctggaggaagccggcagcgacctcagccacatcgtcaagaccaccacctacctgatcgacccgcgctaccgcgagccggtgtaccaggaagtcggcaagtggctcaagggtgtgttcccgatctccaccgggctggtggtgtcggccctcggccagccgcagtggctgatggaaatcgatgtgatcgccgttattcccgagtaaggagccgcacatgaccttttcgatcgtcggccgctgtgccgaaaccgggcaactgggcatcgccatcagctcctcgagcattgccgtgggcgcccgctgcccgtggctgcgcccaggcgtgggtgccgtgtcgacccagaacatcacgctgccggccctgggcccggacgtgctcgacctgctggaacaaggactggcccccgccgaggccatcgacacggccctgacccgcaacggctacagccaataccggcaactgacggcgattgatcacctgggccgcaccgtgcatttcagcggcagcgaaaccctcggcacacaccacgcggtatcaggtgagcagtgcgtggcggcgggcaacatgctggccgaccgcgcggtgatcgaggcgatggtcactgctttcgagcaaggtgaaggccaactggccgaccgactgctgacggccatgcacgccgcgattgccgccggcggcgaagccggcccggtgcattccgctgcgctggtggtggtgggcgaattgacctggccgatcatcaacctgcgcgtggattgggccgatgaacaaccgatcctcgcactgcaaacactctgggacgcctaccgtccgcaggtgcaggactacatcgaccgcgccctcgccccggaccgttcgcccggctacggcgtggccggagatgaccgatgagcaccagccgcgaactgctgcaatcgctggttgcgttcgacaccaccagccgtgaatccaacctgcaactgatcgagttcgtgcgcgattacctggccggtttcggggtggccagcgagttggtctacaacctggaacgcagcaaggccaacctgtttgccagcgtcggcccggtggaattgcccggcattgtgctgtcggggcataccgatgtagtgccggtggacggccagccctggacggtgccgccgttcgagttgaccgaacgcgacggcaagctgtttggccgcggcaccgccgacatgaagggctatatcgcctgcgtgctggcgctggtgccggcgttggtcgccgcaccgctgcgggtgccggtgcacatcgccctgtcctatgacgaagaagtcggttgcctgggcgtgcgttcgttgcttgcagtgttggagcaacgcccggtcaaacccatgctgtgcatcatcggcgaacccaccgaactcaagccggtgctcgggcacaagggcaagctggcgatgcgttgcgatgtacatggcgaggcgtgtcactcggcctatgcgccctatggcgtaaacgcgatagaacatgccgccgagttgatcggtgaactggggcggatggggcagcgactgcgcgatacccaggatgagcggtttgacccgccgttcagcacggtgcagaccggggtgatcagtggcggcaaggccctcaacatcgtgccggcggattgccggtttgatttcgaagtgcgcgcgttgccgtcgcaagacccgtccgaggtggcggacgaattgaaggcgtacgccgagcagcaggtgctgccgcgtatgcaggcagtgagtgcgcagagtgcgattcggtttaccgagctgtcggcgtaccccggcttggtcaccgacgagcgcagccaggcggcgcagtggattgcggcgttttccggctcgaaggaattcgggacggtggcgtttgggaccgaaggcgggttgtttgatgcagtgggcattcccacggtggtgtgcgggccgggcagcatggaccaggggcataagccggatgagtttgtgacggtggagcaactggcggggtgtgatgcgatgttggggcggatgttggcgtctgttcgcgcttgagcacttgggttcatgcagagcctggtaagcgcttgattttgtagtgagcgggcttgccccgcgcgaggcaagttcgctcactacaaaagcaaggcatgcctggatttagccaaggattcgggcgagttcttcttggcagtaatcgacaaacagctgcaccggcttggtcagcggcgcgcggcgcagccataccgccgacaggccggaaccagtgacggtctcggccaacggcacacacacgaccttttgcccgtcataggtgtactcggtgaacggcttggtcaccagaatcgaaaacccgaaccccctccccaccatgccccgcaccatttcgatcgacggcgagctgaacacgatattcggcgtcagcccgcgttcttcaaagatgctcacgaagtaggtgcggctgggcagcacgtccagcaggatcatcggttccagcaccaggtctgccagcgacaccttggcctgttgcgcaaagcgatgatcggccggcaacaacgcatagggctgctgcggcggcatcagcggcgtggtctcgatagtcgcgcccaggtcgtgctcgaacagcatggccacgtcgatactgcccgccgtcagcgcctgcaccagctcctgttgttcgccatcgcggatacggatttccacccccggccaacgcgccttgaagccggcgatcaggcgcggcaggtacagcggcgccacggtttcgaagcagccgatatcgatctgccccgccaccacgtcattgtccgccagggcgttctgctcgaactcgtgggccacccgcagcagctccagcgccttgcggtaaaagcgtgcgccgctgggtgtcagcgacacgccctgggcgtgatgacggataaacagctgcacgccaaagctgtcttccagctgcttgatcgccgtggataccgacggctgcgcgatatacagcttgcgcgacgcctcggcgacgctgccgcactcggcggtggtgacgaaatatctgagctggcgcaggttgtaggcagccatcgggacctccagaaacgtgggacttcgcccgtcaatcaggtgtaggcaacatacccgagcgcgacaagacgcgagctatattttttaaggtctatagcaacaaacttactaatttacctccccgcgcccattgcagatgatcactccaacaacaaagcgccgcgcaggtggcgcacagcgaagtacgtcaacgtactcaccttgccttggagctcgtcatggttaccactgcaacatcctccgccccgcttatcgaaaaacacacgattggatacgtgcccccggaagaccgccatggaaaggtcagagacctgttcaccctgtggttcggcggcaacatcgcgccgttgccgatcgtcacgggggcgctgggtgtgcaactgttccacctcaacctgctctggggcatcgtcgcgatcctcgttggccacctggtcggcggcgtgttgatggcgttgcactcggcccagggcccgcagatgggcatcccgcaaatgattcagagccgtgcccagttcggctcactcggcgcactgctggtggtggtgattgccggcgtgatgtacgtcggctttttcgcctccaacatcgtgctggcgggcaagtccctgcacggcgtggtcgacgccgtgcccgtgccggtgggcatcgtgatcggcgccatcggctccggcatcatcggcatcatcggctaccgcttcatccacgtactcaaccgcatcggcacctgggtgctgggcgccgggatcgtgctggggttcggctatatcttcacccacgtacagaccaccgacttcctgacccgtggtgaattcaacatctccggttggctggcgaccgtgtccctggcggcgctgtggcaaatcgcattcgcgccctacgtctccgactactcgcgctacctgccggccgacgtgccggtcgcctccaccttctggaccacctacctcggctcggccttgggctccagcctgtcgttcatcttcggcgccgtcgcggtgctcgccaccccggtcggcatggacaccatggacgccgtcaaactcgccaccggcgccatcggcccgttgatgctggtgctgtttctgctcagcgtgatcagccacaacgcactcaatttgtatggtgccgtgctgtcgatcatcaccctggtgcagacctttgcataccgctggattcccaccgccaaaagccgcgcggtgatctcgatcctggtgttggcggcctgtgcgattgccgcggtgtttgcctccaaggacttcatcggccacttcgtcgacatggtgctggtgctactggtggtactggtgccgtggacggcgatcaacctgatcgacttctatgcgatccacaaaggccagtacgacatcgcctcgatcttccgcgtggacggcgggatttacgggcgatacaacccacaggcattgctggcgtatgcagtggggatcgtggtgcagattccgttcatgaacacgccgctgtatgtcggaccgatttcggcgcatatcaacggggcggacctgtcctgggtggtggggttggtggtgacgtcgccgttgtacttctggttggcgagtcgggacagtgcgtataagcggcggatggacggagggaagttggtgggtggggtttgatgcactccctgtgagctgagtgatgaagtcattgtggcgagcgggcttggcccgcgttgggctgcgcagcggccccagtaaggttgaatgcggtgtgccaggcaggtctcctgtgctgaatttggggctgcttcgcagcccaacgcggggcaagcccgctcgccacaacagcctgctcgccacaggggatctgtgtcgctcgggtcgatgtttgtctatcatgtggcctctcgttcaatgcctcaggaaacgcccatgcccgccctcaccttgcgcaacgccctccccgccgacgccgcccgttgctttgaaatcgagaccaccgcctacgaaggcgacgaggccgccaccctggaaaagatcgccacgcgtattgcgcagtacccgcaaggttttctgatcctggaagcggctggcgaagtggtgggtttcatcaacggcggctgcgcccacaaggtggtgatgtcagatgaagcgttcaaggagttggtgggccactcggccgacgcgccgaatgtggtgatcatgtcggtggtggtcgacccggcgcaccagggcaagggttactcaaaaacgttgatgaccgagtttgtgcagcgcatgcgcggcatgggcaagcagacgattcatctgatgtgcaaggaacagcatgtggcgctgtatgagcgcatgggttaccagtatgtgcagccgtcgccgtcggatcacggtggcatggcgtggcatgagatggtgatggtgttctagccacccgggtcaaggcggcacttgtgtgtccggacgcaagcgcttgcaacacacatcgacaacgaccagccacgccacatccccctggatgacaccgccggggatgatgccgaagtgttcgaccccaatacgcaaagctggcaacccacccaggcggcgggcaaagggcaatatacgccgctgggagatccgtaccgcgaaccaatagattttgagatcaaggccgataacatgggaggatggcaacgcgcataagccagacgagaacccgtgatgacagccctccacattgaagtcagcgaccagcccaaccccgacgccgagcgtgtcctcggcgccggcttggcggcgttcaatgaggccatcacggggtataacgaccggcgcttgctggcggtgctgatcaaggatcccgacacccggcaaatccttggcggcatcaccggcaaaaccaccctgggcacggcgtttctcgatctgtttcatctgcccgacaccctgcgcggggcgggtcttggcagtcagttgctgcacgcctttgaagatgaagcccggcgccgcggctgtcgccacgcagtgctgtacaccctcagttttcaagcgccgggtttttacgagaagcacggctgggtgcgctttggtgagattccatgcgaaccggacggcagcagccgggtgtttctgtctaaggcgctgtgatgttttaccagctccctgacgccccgccgccgccactggaaccaccgccgcccgatgaactgctgctggaactggaacgggagcttccggagcttgagccggaacctccgccagaccccgagccgccctcggaaatactctggataaacacaataaacgccatgatcgacgcggccggtatcgccactatccagccctggtaaccctgccccagcaacacccccacggccacatagaccgccagcaccgccaacacacgtaacatgaaaaagcgcgggcgttttttccaggattcacggatgacgaaaaacagccccacgtataaccccagtaccaaggcgccgccaaacggccacaccagccaatggacgaaattgacctcgacgaagtggttcaccaccagcaccccgacgatgtacgccagcagccccaacacgctgtagaacaccccacgcgccagccacagtgagccgaacgtggcgccgccgatcagcaacgtcagcggcactacaaacaggtacatcggccaatcgcgcccgccgccatagatcgtcaggagtactgtcaccaccgcggtggcaatcaacgcgcggcgccaatgcagcttgccggcggcgatgagcacaccgccgatagcgccgatgacaaacgccagcagtatcgcaatgaactgcggattgagccccggccccgcaatcgcgggcaagtcaccaccgtccaccagcaccaccaggtcgttcacgccctgggagacgccgcccacaaaatcgccctggcgaaacgccggggtgatgtgctcttcgatgatgcgatgggccaacaggtcggtcactgtgccttccaggccatagcccacctcgatgcgcaccttgcgatcatccttggccaccaccagcaggatgccgtcgttgatgtccttacgccccagcttccaggcacggaacagttggttggcgtagtcctcgatactcgcaccacccgtggtgggcacgagcagcagcgcaatttgcgcgcctttgcgctgttccaggtcggtgagctgttttttcagacgggtggcagtggcggcgtccagcgtgttggtgaggtcgatcacccgctggtcgagggccacgccgatgggcgaatcctgcgcatgggccgcgctcaacacgccgataagcagcagtgccaccaggcccaggatcgattgccgcaaaatcgccatcatgctttgttacctgaagtttcttcctgaaggcgccgactttaccttatcaacgctataacgcgtgaccccacggcgttgactatctaaactgaccgtatacatagcaatacgccataaccgggaaatccatggatctacgtcagcgcaacaacgtcaatgtgatgggcaccggcacgtcgaccctggtgttctcccatggttttggctgcaaccaggccatgtggaactacctggcgccgcatttcctcgagcgttttcgtgtggtgctgtacgacctggtgggcgccggcctgtctgacctgagcgcgtacgacaaagacacatacagcacgctggacggctatgcccgggacctcaatcagattatcgatgcccatgccatcggcccggtgattctggtaggccactcggtcagcgcgatgatcggcaccctcgccgaccgccaggccccggggcgtatcgccgcccacgtgatgatcggcccgtcgccgcgctatatcgatgacgacggctatgtcggtggtttcaaacgcagcgatatcgacgacctgctcgacaccctcgacagcaacttcctcggctggtccagcgccatggccccggtgatcatgggcgcgcctgatcaacccgcattgggcgaagagctgaccaagagcttctgccgcaccgaaccggatatcgccaagcagttcgcacgggtgacctttatgtcggacaaccgccaggatgtgatcggcctgaccatcccggtgctgatcctacagtcgaccgatgacctgatcgccccggtggctgtcggcgaatacctgcacagcatgttgcccaacagcacctatcacttggtggacaacgtcggccattgcccgcacatgagtgccccccaggcttgcgcggcggccatggacagcttccttgcgccgtggacaactgcacgtgccagctgatctgttcgacagcgccgcctgcgccctggccgtcacctcggaagatggcaccctggtgcaaaccaacgcacgcttcagcgaatggctgggcttcagcgccgccgagttgtgcagcaagcgcttccaggaccagctgaccatgggcggccggatttttcaccagacccacctggcgcccatgttgcgcatgcatggcagtgtcaacgaggtgaagctggacatgctgcaccgtgacggccacaagatcaccgtgctgctcaacggcaacaagcgcgagcaggccgacgtcgcggtgtacgacctggccctgttcggcaccaccgaccgcgacaagtacgaacgcgagctgctcaacgcacgcaacctggccgaagcgctgttgcaggagaaaaccgccaccgaactggccttgcagcaagcccaggccgagttgcgcgaggcctatgcgatttcccagcgccgcgcattgttcgccgagcagatggtggcgattgtcagccatgacctgaagaacccgctcaccgccatccgcatggcctctgactttctcagccgcagtgaacgcacggccaaggaacgccagttgctggggcatatcggccagtcgtccgagcgcgcccaacgcatgatcgccgacctgctggacttcacccaggcccgggtcggccagggcatcactatcaaggccctgccgttggacttgcatggcgtgattcatcgcaccgtggacgaactgcgcgtggcgtttcccaaggcgacgttggaacatcacgcagaaggccatggcgacgcctgcctggatgccgaccgcgtgcagcagatcatcggcaacctggtggccaacagcgtggcctatggcgacctgcaacgaccgatccggattacctcacgcctgggcgttggcggctgcgaagtggcggtacacaaccacggcgcggccattcccgaagcgttgctggccgggctgttcgaacccatgacccgaggtaccgaccagggcagtgatgtgcgcagcgtgggcctgggcctgtatatcgtgcgcgagttggccagggtgcacggcggggacgtgacggtgagttcctgtgctaccggcggcactacctttaccgtgacgtttcagagtacgtaggcgctgccttgcatcaccggctcgacactgccggtcagcaccacaccgccctcacccgcccagtgcacggtcacgatgccgccgtcgcactccacctgcaccgtggcatccagcaacccgcgccggatcccattgaccaccgcgccgcagcagcacgagccggagcccagcggcacgccgccgccacgttcccagatgcgcaggcgaatacggccgcggtcgagcacctgcacgaaatgcacattggtcttgtccgggaacaaccgatgtttttccagcccagggccaacggcggcgatgtcgattgcgctgaggtcatccacgaaaaacgtacagtgcgggttgcccatgctgcacgcggccgggccaccctcgataggcaacacacacgtgtccatggcctcggccagcggcactgcatgccagtccagcgacggctcgcccatgttcaccgagacttgccgcccgggggcacgtacgcaggtcagcaggccccggtcggtacgcaacagcaccgaatccgtagcagcctcatgcatcaagcgatcagccacgccacgggtcgcgctgccgcaggtggccagcggcgtaccgttggggttccagaacttgatgcgcgcggcggcatcatcgcagtcgagtaccacggcaagctggttgaaaccgataccggtgtgacggtcgcccaggcggcgggcgatctgcgcggtgatggggtcgtgcaagccacggcgatcgatgatgatgaagtcatcgccatgggcgtgcattttcacgaacggcaaaagcatcggttgtcctgtggtcgacctgtgggggaactgaaggatactctgaaccggcccactcttatgagacccacctatgctaattgtcttcagtggcctgcccggcaccggcaaaaccacgattgcccgcgaactcgcacgccagaccgcggcggtttacctgcgtatcgacttgattgaacaggctatacgcgaggccggtgtgctggcaggggacgtgggtgccagcggttatggcgtggcgaatgcactggcgctgagcagtctgcaactgggccacaccgtggtggcggactgcgtaaatccggtcagggaaagccggcaagcgtggaaggccgtcgctgcagcagcaaaggtggcattactgaatgttcgggtgatctgctcagaccagcaggaacatcaacgacgggtggaaacccgcacgggggatattcccggcctggttccgccctcctgggcgtctgtgttggcgcatgagtatgaggtttgggatgaagtgcccttgacgctcgataccgcctgcatgacaccggagcaagccgtgacaacaacgatggcgaacctcacctctgtggcgagcgggcttgccccgcgttggggcgcgaagcggccctgaaaccaggcaatgcgttctgacaggggaaatgcaggggcttaccggggctgctgcgcagcccaacgcggggcaagcccgctcgccacaacaggcctgctcgccacgaggttgagccgcctacaacacgctgcccatcgccttcatcaacaccaggtcccgcccatagatatccggcgcatacaccaaaccgccctcacgattgacctccaccgtccagtagctcaacaacaccggcaccggcgtggccagcctgaattcgtgggtcacgccggtggccagcagttcatcggtgcgcgcacgttcggccgggctcaccagcagatcgcgcaagagcagcggttgctcgacccgcacacaccccgaactgaacgcccgtggccctttggtgaacagcggctggctcggcgtgtcgtgcaggtacaccgagtacgggttgggaaagcgcatcacgatcttgcccagcgggttgcgcgggccggcctcctggcgcagcaggatattaccggggcgcgcccagtcgatctgttccggcgccagcgggtggccttcggcatcgagcacttgcaggttctgctggcgcaggtattcggggttgaggcggatggccgggagtttgtcctcgcgcatgatggtgggcgggatggtccaggtggggttgagggtcagccgggtgatgcgggatttgagcaacggcgtctggcgctcggcgcggcccacttgcaggcgggtctgccacaccgggatgccgctctggtacacgctgagttgcgcggcggcgacgttgaccagcacgccttcaggctccaggtcctgggccaaccagcggaagcgttcgaggttgatgcgcagttgttcgcgccggatcgccgggctgatattcagctcggccaccgtaccggcgccgatcacgccgtcagcctgcaacgaatggctcagttgaaaggccttgaccgccttgaccagttcgtcgctgtactgcttgccgccgggggccttggccaggtaacccccaccgatcaggcgccgcgccagttccggtacgcgcgggtcgtccatgccggggcgcaacagcgggccgttggcgaccgggtcccaatgtggcaatggttgctggcgcacagtggaataggcattgcgcaggctgcggtagaggtccgcgctggggcgtgcctgatcgaacgcctggggcatgtcctgcaggccggtggcggcaaaggccagcacttcaacgttggcgtcgcgggtcggtggctgggaatgccacaggggctcgaagcgcgattgctgcaggcgcccgtagtgcagatcctgcagggcttgcaagtagtgctggctggtcgcgatgtcgctgcacagcacgttggccgtggcatctggcacaggcaggctatagtgggtggggtccaggccgtcatcggcgagcatcagcaactgagattgcagggcttgccggcgctcgtcggcggaccacaacggcagattcccctgctgttggtagaacgcttgcagacgcagttgggcggcggcgtcaatctgcggcgccaagccggggcaaacgctcggcaattgcgccaaggcctgctgcaccggcgccagatcgaccggcgcaggtgttgtcaccggcaacggctcgaccggcagcgcgtcggctgtcgcgaccaatggtgcaacgagcaggcaaatgctcaagtaacatgcgtgttttttgaacaattgacctggctccaatccacaccgggggatactttgtagatgctgacttttatgcgccgcctcggcttgatctccgtgacgctggctacgctgagcaattttgcgctcgccgctaatcagacctctcctaacttgtatagcagcctggcgcgctcggctccagaactcaatcccactgtactcaaaagcgccctcaacgcggtgcagtgcgcggtcaataacggcgaggaacgctccgaacgcctggcggtcattgactactcccagccttcgaccgcccgtcggctatggatcttcgatttgcgcaagaagacccttgttctgcgcgacctggtggcccacggcgccaagtccggggaaaacttcgccacccagttctccaacctcgaaggcagccaccagtccagcctgggcttgttccgcacccaggaaagctacctgggcacccacggttactcgttgcgcatggacggcctggagccgggtttcaatgaccaggcccgcgaccgcgccatcgtgatccacgccgccgactacgtaagccccctgtggagcaagcgcgaaggccgtatcggtcgcagccagggttgcccggccgtgcgcccgcaggtggcccgtcaggtagtggacaagctcaaggatgggcagttcatgttttcgtggtaccccgaccagcgctggttgaagtcgtcgacctacctcaattgcaaaccccaacaggtggcgagtagtcgtacaatccgtggcggatagcctgtccccatagataagagagcgccgcatgcttctacataagtccacctggatcgagatcgggcagtttctggaacgcagccgcacggtggtgattcccatcggttccaacgaacagcatggccccaccggcctgctcggcaccgactggatgtgcccggaaatcatcgcccatgaggcgcagcagaacgcggatatcctgatcgccccgaccttcaatatcggcatggcccagcatcacttgggttttcccggcaccatttccctgcgcccttccacctttatcgccgcgattggcgactgggtgcgttcgctggccgggcatggtttcgagaagattctgtttctgaacggccatggcggcaatatcgccacgattgaagcggcgttttccgagctgtacgccgaagcgagcttcgcccgtcgccccgccggctttgcgttgaagctggtgaactggtgggacctggagggcgtaaccgacctggcccagcgccaattcccggtgggccatggcagccatgccacaccgtcggaaattgcggtgacccaatgggcctacccggacgcgatcaagaccgccgactactcaccgcaaatcgccaacaccgggccgatccgcgaggcgctggacttccgcgcgcgcttcccggatgggcgcatgggctcggacccggcgctggcgacggtagaaaaaggtggggagttggtggcgttggcggcgcaggggttggtcaagacagtgaacagcttcagctacgaagccaaaccctgagccatacatagatctacatgtggaagggggcttgcccccgataacagtgtgtcagctacagatgctctggctgacccaccgctatcgggggcaagccccctcccacatgtggctttatgtatggcctgggattactggcagtcctttgccgccagctctagccgcgacggcgtaatcgtcgacgccaacggcttgcgctcatacaagaacaccttggcgccctctccagccttgtaggcttccagcacgtcatcggcggcaatcttgctggtcagcaccactttggcgtgacgcgagttctgggtgacggtcgaagtgatcccgtgtttttccagcttgggcagcacgcactgcacataggcttccgggctcttgctggtttgcagggtcaggctcggggcattaggggcggtgacacaacccgccaacaccagggaagcaatggccaaggccggggcgaaaaaagcgcgcatgaaaaattcctgactataaaaataaaggttcacatcaaccggcacggaccaacgctttgagcgacgcatcgaactgcttcaaggcatcgagttgcacatcacgctgctgctcgatctgcgcggcaatctccggcgcggccttgtcatgtacccacaccgatggcacccgcttgtgcaccgagccttcggccctggcgatgtactgcaggttcgcgtcatagaaccgcgcaataaaacgcgcctcgaccacatcgttacgctgggtcagcagttggttgtgggtatcgagcatcaccaccacatcggggtgtgcctgcaccagggcatccaggttgtcgtagaccgttactgacaaaaaggtgccctgcagcgagctcatcaaccaatcgatggccagttccgggtcggaactgttgacgaacgcctggcggatacgcccgtcgagggcatccttggcgccattcaaggccatgtcgtggtagcgttcgaggtagctgaggttgtcgcgggtgttgtcgctcaacaacacacccaccgactgcgcgtgctgcagggagtctacgctaccgttgataggtagcaaatggctggtatgcagatcatcggcgattgccgcgttgttgacgaccaccgtgccaagcatcagagccatcaaagccaactgaataaacgtcctcatcgcgcatttccttgaacagcgtctcgatggggcgattttccgcttttccggaaaaaacagaacttgcgatgcgtgatggtgactattatctgaaccgatagtgctgacataaaacctataaggaccacgccatgaagccccaccagaaaaccttcgaccgcatccgcgaagccgtactaccggagtttcgcgagcgggtcgccgattacctggtcgactatgaacacgtgctgcaggacgaggcggcggacgcggatcggatcagcgccagcgcccagcaactgcgcggttacctgcgcggcctgaacaccacgcgggtgctgggtatggccgactgggaggagctggaccgccgtgtgaaagaggattggctacgggtggtcgaagccgaataactgccggggtgtatcgatcagcaaggcctgcgcgaccgctgccgaccagcccagggcctggcgctgctcgatcactacgcggtagccgatggtggtttcatgctgggtgtgcggccagtcactgccccacaccaagcggtgcagaccgaaactctgctgcaacaacggcatggcctggcgcgcaaactcaaggttctgcgccgggctgccggccaggcgatagatccccgagaccttcagccacaactggccgctgaggcccaagcccagtaactcggcaaaaccgcgctgcgcgacgccgagtcgtgcatctggccggccgaaatggtcgaccaccagcttgaccccgaacggcagcaactggcgcaccaattgcggcaggtcgtccacctcgcggtgcaactctacgtgccagcccagcacgacgatgtgctcgaaaaaaaccttccagccgggctcggcaaagtctggcagcgcccggcccaccaggttcaagcgcacgcccaccacgccggcgcgggccatcgcctgtaaagcgtgctgcgggatatcacggtccaccaccacgacgccgcgcaactgatcgggtgcctgctgcaaagcggccaacaggtagccgttgtcggtgcccaggaaactgggttgcaccaacacgccgtggctcaggccattggcgtgcaagtggccgatgtagtccgccagcgtggcgtcgtagcctggagtgtagcgacgctcaccggccagggtcagcgcctggctgaatacatgggcgtgggcgtcgatgccggtgatggaacggttatcaagcatggggtcgtctttcaaaagtaaaaaggatcaggcctgggcgcgctggccgctcacgacgcgctcggtgggtgtcgcttccagcacgcggccacgggtttccggcaggcacagcgcggcgatcacggcgacgccgtaggcgatcccggcatcgatgccgatggccgagccgagggacatcgagtcgctcatatgccccaccaggaagggaaacaccgccgacagcacgcgcccgaagttgtagcagaagcccacgccggcaccgcgcacatccgccgggtacaactcgttgaacaacgcccccaggctggccgggataccggcggcgaagaaccccagcgggaagccaaggaacagcatctgcgtattgctcagcggcaggaacacataggcctgcacggtgatcacgcagcacagcgcaaacagcacgatgttcttgcggcgaccaatgcggtcgatcagccagccactggcgatgcagccacaccagaaggcaaagatgatcaccgccaggtagccgcccgagttgagtaccgacaggttgcgctcggtcttgaggaaggtcggcagccaggtcatcaccgcatggtaaccaccgtgggcacccaggcccagcaggccgccgaacagcgtcacgcggatcagctcagggcggaagatgccggccagggacttgaagaaactctggggaatcgcctgctccttttgcaggcgctggaagctgtcaggctcctccacgttgcggcgcacccagataatcaggaacgacggcagcagccccaccacgaacattacccgccaggccatgtcctggggcacaaacgaatagatcagcgcaaacaccccgaccgccacgccccagccaacggcccaggcgctctgcacggtgcccatcaccttgccgcggtacttcgggttgatggtctcggccatcaacaccgcgcccgccgcccattcaccgccgatgccgaagccttgcagtgccttgacgatcagcaactgatgaaagccggtgacgaacgccgacaaaaacgtgaagaacgaaaaccacaggatcatccactgcaacgtgcgtacccgaccgtagcggtcggacaaggtgccgccgacccaaccgccgatggccgaggtcaccagcgtgacgccgctgatcagccccgcatcgcccttgctcaaggcgaaggccgcgatgagtgccgggatcgccaggccgaacatctgcacttccaatgcatcgagggaccagccgccgaagcaggcccagaacgttttgcgctcccgaggagtgacttggcgataccaactgaacatgatttttatccttataggtcaaacgcgaggcagccgggcgcgaaccgcgccacagccgggccagtgttgggcaaacaattaacggtgcgggtgtgcggtcagcgaatgtccacgcggtagcggaagtgttcggcatgcccacgggagcgtcgccactccaggggttggccggcgtagtcgcgggccagacgctcgatcaccaccaccgggctgttgaccggtacttgcagcaaccgcgcgtacaccgcgttgaccgattcggccgtgagggtttcctcggccgaggccaccacctgcccgcagacactctcatacaccggatagagcagcgggccttgcgcggacaggtctatgtcgagcaaggcctggaagcgcgcacgcggcagccagatttcttcggcgagcagcggctgcacgtcaaacagacgggtccgaacgatgcggatcacttgggcctcgggggccaggcccagcgcctcgctggccgccgacggcgcggccacggactcgaccgtgaggatgcggctttgcggcacctgacgctcgcccgacgggccttgaaaacggaaaaacctaaacagcgacgactggaattgcgggcggcgcacaaaggtgccacggccctgctgacgctccagaatgccctcgctcaccagcgcatccacggccttgcgcacggtgccggtggacagcgcatactcggcggacagcaccgcttcagtgggaatcgcttcgccagggcgccagcgattgttggcgatctgctcgatcagctggtcgcgcaagcgttggtaaagcggcaggcgggcatcactggacagcgtattcatggggtcacattcactttgttatgtagtcatatatatgaatatgaccggagtattcttccgtcgggtgacgcctgtcaagcgcatcaccgcaaaaggaagatgaatggtcgttactgcgtcgggcgttgttgctgcacccacgcttgcacggaaggccgctgccactggcgtcgggcgtactccaccaactcggcaggcacgctgtcaccgttgaggatcaggcgattgagcatcacggccaggtccacgtccgcgatgcaccactcaccgaacaagtacggcgggttacccgccaacagcgcctgggtcgcactgatcaacttcgccgccgccgcttcagccactggcgacagtgcgggcatcttctgcccatagaacaccaccatcgtcgagcgctcctgacggatcggtagcaagtcactgcgcagccacgcctgcacctggcgcgccctcgcccgctgttttggatcggccgggtacaccggcacttcagggtaggcctgctccaggtactcggtgatcgccgaggactccgacaaggcgaagtcgccttccaccagggtcggcacgcgctgggtcagggacagttgggcaaagtcggcggcgtgctgttgcgcggcatccaggtccagggcgatcgtgtcgaacgctaggcctttttcgcgcagggtcacgaacaccgacatggcgtaggggctggtgtacagatgatccacatacaggcgcataacgattctccttgaggggaacaccacgctacgagatgcgccacaagaaagacaatgcgctgtttttatgggggcattcctgggtggaataccgggctaaccggcaaatccgccctcgtccagaaaggcacgttcttcatccgtggtctcacgcgccaacacctcgtttcgatgaggaaaacgcccgaattgctcgatgatgcgcgcgtgttccttggcccaatggtaggtgttggcgtccagttgccggttcaggtccaaggagcgctgttgatcggccgggtcttccgaatgttcgaatggcagatagcagaacgcacgcaatgccggttcgacctgccggtccagcccggcgtccaccatgcgccgggcatacagccgtgcgagcgggtcggtggcgaacatatgggcggtgccgcggaaggcattgcgcgggtactggtcgagcaggatcagcagcgccagggcgccatgcgccgagtccagccagctttccagctcacgccgggccgcttgcaggtgggcggtgtggaaggtgtcgcggaagctggcgtcgaaggcagcgtccttggcaaaccagcgtttggggccggcgtgttgccagaagtcgatgacagcctgcgcagtggtcatggtgagtacctggaaagataatttagctgacggcatcagaatccaatgttataggataacacccccttgccgccctgccctgtgatcacgcccatgaccgatgctgttcccctgcgccaacgcctgctctccatcgacgccctacgcggcctggtgatcctgttcatgctgctcgaccacgtgcgcgaaaccttcctgctgcaccgccaggtcagcgacccgatgaccatcgacagcaccgagcccgcactgtttttcagccgcaccctcgcccatctgtgtgcgccggtgttcgtgttgctcaccggattgtcggcctggctctacggccagaagtaccagggccgccgcgatgtctcggcgttcctgttcaagcgcgggctgttcctggtggtgctggaattcaccctggtcaacttcgcctggaccttccagttgccgcccagcgtgatctacctgcaggtgatctgggcgattggcgtgagcatgctcgccctggcggcgctggtgtggttgccgcgagcgctgctgatcgtgttggcgctgctgatcattggcgggcataacctgctggacggggtgcacttcgatacggggtcggccttgcatattccgtggacgatcctgcatgagcgcagctggatcgaggtgggcgattcgctgcggttgcgcacgacctacccggtgctgccgtggatcggcgtgattgcattggggtacagcctgggcccatggtttgccaatggcatgccgccggcgttgcgccagcgttatctgttgctgggtggtgtgggtgcgttggtggggttcgtgctgttgcgcaccgccaatggctacggcgagaagccttggcaggcctatgagagcggcgtgcagacgctgatgagctttttcaacatcaccaaatacccgccttcgctgctgtttctggcgctgaccctgggccttggcttgctgctgttactggcgtttgaacgcgcggggcaaaaacgctggatcgccatcctggccaccttcggcgcggcgccgatgttcttttatttgctgcacctgtacgtgctgaaaatcctctacgtcgcctgtgtggcgttgttcggcctcaaccacggcaactacttcggtttcgacagcatcggcgccgtatggctggtggcgctgttgttgccactggcgctttacccgcctgtgcgctggttcgccgggctcaaggcgcgtcgccgcgacctggcctggctcaaatacctctgatccctgacgctcctacagcgggtggtgtcaggccgatgcagccatcgtcggcagacggtaatagggagacaaactcattttacttctgatggtcgcaaggtccgctcatgctgcgaccagatgcacatagaacgcgtgaaacatgaaatatgcacacaccgcgagagccaaacccatgcaccggttgaacagggtgaacgccgacgccccattgatcctccgccccagcagcgcccccaacaacgcgtagatccacggcgcgcaaaacgccccgaaggccagcgccgccgagaccacggcgatggacgcgtagaggaagatgtccatggaagacctgtagtagaggaagtgaggcgagtctactgagcggggttggggggattcttgtacgtttgtggtagggcaggatttggcgatgctgggcatcccagcgggagcaagctccctcgccacgggtatagtgtttgtcgaactctttgggataaaaccagacatggatgcaatcaatcaaggcagttgcctctgcggtgcagtcacttatcaagtcgcgacaccgctcaaggccgccacccactgccactgcaaaaaatgccagaaagtgcatggggcagcctttgccacttacgccagcgcgcctcgatcagacgtgactatccaagctgtgcgggacacgttgaaaagttatgagtcatcaccgggcattactcgccagttctgttcggaatgcggttcatcgttgttctggcacgatgcaaaagggctttatcccgattggatttcgattgcactgggcacactcgataccccgttcgcgcctcaggacctgaagcaaagctgcatcgagtccagggtcgcctggctgtaggagcgagcttgctcgctcctacagttgctacccgcgtttacggacctacatcaacggaatcgagtagttcacaaacacccgattctgatcctggtcccgcgccacttcactgcgcgacacaccgttgcgccagccgaacccgacgttcttgaacgtgccgctctgcaccacgtaatccagcgagatatcgcgctcccactcgctcgcatcgttgccgctggcagtgaggatatgctcgcccttcaagtacatcaccgacgccttcaggcccggcacgccaagcgaggcgaagtcataggcgtattgggcaaaggctgtgcgttcaccggcctggatgaaggtctgcacggtacggtcggtgtagaggtacaggctggaaccgccctcccctttgttgaccaggccgccctggttgagttgggcgaagttgctgtcgtccgagacttgctggtaaccggcggtgatcgcgtgcgggcccagggagtagatgaacgccgcgctccaggtgttgttgtcgatttcacccgtgccgttcttggtatagccgccgagcttgtaaccttcggcacggccggcgacgctgctgttcttgccgtcggaggtggtcttgaagtagcgcaggtcggttttcaatgagccgtagtcgcccagcggcaatacatggatcagaccggcaaagtgctgctggtaatagtcttcgaggttggcgtagtagtactggaccaacaggtccttggttacctggtagtcggcaccggcgtagttgaatttattgctttcctgggtgccgcccgccgccgccaggccgctgcgatcactggagccacgaccagtggtgtgctgcagttggccaccgaccagggtcaggttgtcgatgtccttgctggtgatctgcccgccttcgaacgactgcggcaacaagcgcccgtcgttgctcaccaggatcggcaggttcgggcgcaggtagccgtagcgcagttcgctcttggcaaaacgcgccttggccgtcgcaccgccacgggcccaggtgtcggcggccttgccgtcgtcggtggggatcatcgaactgcccacatggcggccggcgccgctgtcgagggtgacgccgagcatgcccacggcatccaggccgaagccgaccgtgccgtcggtaaaccccgactggtagttgaggataaacgcctggccccactcttcggtcttcgacggtgcggcggcgccgtcacggttgtcgttgttgaagtagaagttgcgcaggctcaagttggctttactgtcactcaaaaaatcagccgaggccagggggctcagggcaatgcccaggccgccggtcaatacgcttaacacatgcaaagtggctttcatcacaacctcagtcaattaatccatgggcgtcataaaacggatacggccccgggtattccccgaacacgccgttgtggctgatcaaaccctgctgcgcctcccagcgatgcaacagatagcccgccggctccaggttgaaatgcgcgggcgccgcttcttgtaaatccagcacgatctgatgggaggtgccggggcatacacaactcaggctgccgccgaaacgccgctgcatcggccggtgcagatgaccgcagagcaggcgctccacttgcggatggcgcgcaacgacgtgctccagggcggcagcattgatgaagggttcgcggtccatgtggccgatgccgctgatgaacggcgggtgatgcaggatcagcagcgtcggcgcatccgggcgcagggccaattgctcatccagccagtgcaattggctatcgagcaattggccgccgtgagcgccgggaatggtcgagtcgaggccgatcaggcgcagcggatggtggtcgaccacccagtccaacgggccatcggccgacaacggcagatacgcgtgatcgcggaacgcttccagcaacggcccacggttgtcgtggttgccgggcaccaggtagcacggcatgtgcagccgggcgagttcggggtgcaacacggcgtattcatcggcacggccaaagtccaccaggtcaccgctgatgaccacgatgtcgggccgtgggtgactggcgttcaagtggtcgacggcacggcgcagcgcgcctaacgtgtcgacaaccccgtaagtgaggcgctggccggctttaaggtgcaggtcgctgatctgcgcgacgagaaacggacgattcacgatagagtctcaagcattcagggtgaacaacatgtgcggcgcaattgccagggcaatcggcgcgccgacggcgtacagctggttatcgctgctgtcgaccagcagcggttgcgggccgcccacatccaccagcaggcggctttgcgcgccttggaagaactgcgccagcaggtggccgtgcaagtgcccttcgctctccatcaccttcaggtgttcggggcggcaatacaccgtgctgggcacgtgggcgtcatgccacggcaactcgccgccacagactttcaagccatgggccgctggctcgagcacggcaaaggcattgaggttgccgacaaagcccgcaacgaaggcattggccggtttctggtagatgtcacgcgggctggccaactgcgcgacacgcccgtgttccatcaccaggatgcggtcgcccagggccatggcttcgccctggtcgtgggtgacgaacaccgaggtgatgcccaggcctcgcagcagctcgttcagctcgctgcgcaggcgttcgcgcagttgcgcatcgagggcggccagcggttcgtccagcagcaacactttcgggcgcggcgccaaggcacgggcaagggccacgcgctgtcgctggccgccggaaagttcgtggatgctgcgctggccgtggtgctgcaagcccaccagttccagcaattcttcgcagcgcttgttgcgctccaccaccgccataccgcgaatcttcaagccataaacgatgttcccggccacatccaggttgggaaacagtgcgtagttctggaacaccatgcctacgtcgcggcgttcgataggaagacgggtcacgtcctggtcgccgaaccacacctggcctacatccgggcgttcgaggccggcgatcaggcgcaaggtggtggtcttgccgcaaccggacgggccaagaatggccagggtttcgccgccttcgacggtcaggtccaggtcatgcacggccacggtgccgtcggcgaatgccttgcgacagccttgcaagcggatagtgatagcggtcatcgacgctctccacgggacaaacgggcactgatggcctgcagcgctatcagcagcggcacgatcatcagcaaaaagataagggtgtaggcgctggcgatttccaggcgcgccgaggcgtagctgtcagccaggcccacgggcaaggtcttggtcatcggcgtgtgaagcatccaggtcaggttgaattcacccagggacaaggtcaccaccatcaacacgcctgccaggatcccggcccggcagttgggcaccaccacgctgaaaaagcgcttgatcgggccggcacccaggctggccgccgcttcctccagtaccggcaactgctggcgctgcatcaccgccatcaccgggcgtaccaggaacggcaaggtgaacagcacatggccgaccagaatgaacagccaactgctgcgaaaggtgccgaactggccgtaggtcagcagcaaggccaacgcactggccaaccccggcatggccaccggcagcaccatcaactcttcgaaggcgcggctgaagcggttgttcatgcgcaccaagccgtaggccgccggcacacctatcacgcagacgcacactgcgcaggccagcgccagttgcagcgacagccacacggtgggcgaatacgcctgccacacctgcaccagccaatcgaaggtcaagccactggacagcccgacgaagaaattgcgggtcaacccggccagcagcgacatcagcactggcaccagcatgaaggcgcacaccaacagggtgaacagcagttgcagcacaaacagcgatgagcgcttcacagcacactccccgaatttttcaccaggcggcgcgtgagcagcagcacggcccaggtcaccgcgcctagcaccaccgacaatgcggccgccacggcgaagttggcgtagttggtgaacacgttgtagatcgccaccggggtgacgttcagccgcgtgcccaaggtaaaggcggtgccgaacgcgcccatggaggtggcgaaacagatcgccccgcaggaggccagcgccggcgccaggcccggcacgatcacatcgcacaccacccgccaatgcccggcacccagggagtgcgcggcctcttccaggctgcggtcgaggctctcgcatgcggccatcaccgtgaggatcacccgcgggatcgagaagtacaggtaacccacgaacagccccgccagcgagtaggcaaagatccagcgttcaccggccaattgcaggcccagcgcggcaaacaagccctggcgcccggccaacaagatcaccaagaagccaacgaccacgccgggaaacgccagcggaaacgtgagcaacgccaccagcgccgagcgcccgaaaaactgctgccgggcgagaaacacgccgctgataccgccgatcaacagcgccaccagcgtcaccaccacggccaggaccaacgtttgccccaggctgcccaagtactgcgcgctgctgagcacctgccagtagccgctgccatggctgtcgcggctatcggcgccgagcgccatcaggtgcgccagcggcagcagccagaacgcgagcagcaccgcaaaggccggggccagcgcccaggctgcgtgtcttgccgatgctgccacttacttgacctcgttcaggtatcgggcggcgaaggcttcctgcacagcggccattttttcgtagtccaccacgccggcacgggcgtagtcgctgtcgggcaggaactgtgcggccacctcagctggcatcttcatcggccgtaccgggcgcagataggccttggcccagagcgcctggccttcgtccgacagcacgaagtcgaggaccttttctgcgttggcgcggtgcggcgcgttggccaccaggctcatcacgtagggcacgctgatgctgccttcctgggggatcacgaaagcgacgttggccttgtctttgtagcgggcgcgataggcgttgaagtcgtagtccaccaggattggcaactcgcccgacagcacccgcgcataagcggtctgtttgggcacgatgggcgcgtttttcgccagcttctggaagtagtcgatggccggcgcgaagttgtccaggtcgccgcccatggcgcggttgatcgccaccgccgagacgtacccgacaaacgcgctggacgggtcgaggtaaccgaccatgcctttgtattcaggcttgagcaggtcggcccagctttgcggcaccggcagaccgccgagtgcatcgacgttgaccatgatgcccaaggtgccggagtgaatcgcgaaccaatggccggccgggtctttcagcccggcgggaatctgctcccaggccttgggtttgtaggtgtcgaccacctcggccttttgcgcctgcaggccgaaggtcacgccgtagtaaacgacgtcggccaccggtgcggctttctctgccaccaactgtgccagggattggccggagttcttgttgtccagcggcacttgcacacctgtgctggcggcgatggccttgagctgggtgccccagtcggcccagtccggcgggcagttgtagcagatcgcggtttcggcggcctgggccaggctggccgaaccgcacagcagcacggctgccagggttttacggagtgcgcgcatcaggggtttcctcgtggggttgagtgctttcgcccggccggatatggcaaggcaggcagtgagacgtcggggcattgccggcgatctgcgccagcagttggtcaatcacagtgctggcgagcagcgcgatgggctgcaccacgctgcacagggtcgggtgcatctgggtgccaaggctgatgccatcgaagcccatcaccgagagttgcccgggcacgttccaggcgttgcgacgcagttcggcgatcaggctgatcgccaggaagtcgttggaacacaccagtgcggagggtgcctcagggccttgcagacaaggttcgatggcggcgaattcggcctgggtatgggctggcatttcgatcactgtgcggggctcgaggccgtattcgcgcatcgcatcgcaatagccggcgtagcgcaggcgcgcacggtccgactgcagcgcggggccggcgaccatactgatgcggcggtgcccggcttccagcaggtagcgcgtggccagggccatgccggcgcggttgtccaccgacacggcgctgtagttggggttgctgggttggtggtaggccaacacaaacggggttttctcagtattcaggctgctgagcaccacgttgctttcagcatcggtgaccgtcagcaccaggccgtccacgcgctggcgcaacagctcttccaccacaatgctttcgcgctcgctgctgtagtcggtagtcgccagcaacaggctataaccacgtaaccgtgccgcgcgctccatggcctggaactgttcggcgaacaccgggttgagcaggttgggcaccaccacgccgatcaactgggtggtttgcaggcgcaattggcggcccagcagattgggccggaagcccaactcgcgggcggcggcgaacacctgctcacgggtggtcgggcgcacctggtcgggggaggcaaaagtgcgggcggcggtggcgcgggataccccggccaaccgtgctacgtctttcaagtcagtcattgtcactcgcttgagatcgatctcattggcgaggacagtaatggggaaatgtggcagttcggcggtaaggtgatgacagtttgatgtcgatgaacccgatagacaggggccaaactgtgggagggggattgcccccgatggcagtgggtcagtactggattgggtggctgacacactgctatcgggggcaagccccctcccacattggaccggtgcccatccatagatggtcatactcggagggtagggtcacaaaccgggcgcgcaaaatccgcccactaacctttcgattcgatccaagtgcgggcacaatgcgtgtccttttttggcaggcaccgccgcaggctctcaaaaatgatcaaaacgccgtactacctcatcgataaacagaaacttctggtcaacatgcagaagattgcttacgtgcgcgaacagtccggcgccaaggccctgctggcgctcaagtgctttgccacctggtcggtgttcgacctgatgcagcaatacatggacggcaccacctcgtcgtcgctgtacgagttgaagctcggccgccagaagttcgaaggtgaggcgcacgcctacagcgtggcctgggccgacgatgaaatcgaagagatgctggataactgcgacaagatcatcttcaactccatcagccagctgcagcgttttgccgaacgttccgagggcaagacccgcggcctgcgcgtcaacccacaggtgagcagctccgactacctgctggccgatccggcgcgtccgttcagtcgcctgggcgaatgggacccggtgaagatcgaaggcgtgatcgagcagatctccggcttcatgttccacaacaactgcgaaaacggcgacttcagcctgttcgacaagatgctcggcgtcatcgaagaacgcttcggcgcgctgctgcacaaggttgagtgggtcagcctcggcggcggcatccacttcaccggtgaagactatgccgtggacgcgttctgcgcgcgcctgaaggcgttctccgagaagtacggcgtgcaggtctacctggaacccggcgaagcggcgatcaccaacagcgcctcgttggaagtgaccgtgctcgacaccctctacaacggcaagcacctcgccgtggtcgacagctccatcgaagcccacctgctggacctgctgatctaccgcctcaacgccaagctggcgccgagcgacggtgaacacacctacatggtgtgcggcaaatcctgcctggccggggacatcttcggcgagtatcaatttgatcgtccgctggccatcggcgatcggctgtcgttcatcgacaccgcaggctacaccatggtcaagaaaaactggttcaacggcctgaaaatgccgtccatcgtagtgaaacaactcgacggtactgtcgaggtggttcgtgaatttggttacgacgactacctgtccagcctttcgtaagctggcggataaaggagagataaagcaattgaaaaagaacgttcttatcattggtgcaggaggtgtcgccaaggtggtggcccacaagtgcgcgcagcacaacgacgaactcggtcgtattgctatcgcgtcgcgcaacatctccaaatgccaggccatcatcgacagcgtcaaggccaagggtagtctcaaggtgcccgccgatatccaagccttcgcgctgaacgccctggacgtggaagcgaccaaggccctgatccgcgagacccaatcgcagatcgtcatcaacgtcggttccgcgttcctcaacatgtcggttttgcgggcctgcatcgacaccggcgttgcgtacctcgacaccgccatccacgaagagccgggcaaggtctgcgagaccccgccgtggtacggcaactacgaatggaaccacctggaagagtgcaaacagaagaacatcacggccatccttggcgtgggcttcgacccgggtgtcgtcaacgcgtatgccgcgctggcgcagcaacagcatttcgaccgcattgattcgatcgacattctcgacgtcaatgccggctcccatggcaaatatttcgccaccaacttcgacccggaaatcaacttccgcgagttcaccggacaggtgtggagctggcagaacagccagtggaccagcaacaccatgttcgaagtcaaacgcaccgatgacctgccggttgtcggttcgcagaacctctacctcaccggtcacgatgaagtgcactcgctgtcgaaaaacctcgacgtgcccaacgtgcgtttctggatgagcttcggcgaacactacatcaacgtgttcaccgtgctgaaaaacctcggcctgctctccgaaaaaccggtcaccaccgccgaaggcctggaagtcgtgccgctgaaactggtcaaggccgtactgcccgacccgtcttcgctggcaccgggctacaccggcaagacctgcatcggtgacctggtcaagggcaccaagaacggccagccccacgagatgttcatctacaacgtggcgtgccatgaagaagcctttgccgagaccgacagccagggcatctcctacaccgcaggcgtgccaccagtggccgcagcgctgctggtggcccgtggcgagtgggatgtgaagcacatggccaacgtcgaggaactgccggccgaaccgttcctgaaagcgctggatgtgatggggttgccgactcgaattaaagacgagaacggtgatcgggcttgggatgcgattgcctgataggcgatagcggcccgaacaaaaaaatgcgccctctggggcgcattttttgtttggggcaaacacagccctcacgaccaatgaggtcaactgtgggagggggcttgcccccgatggcggtgtgtcagtcaacacatatatcagcagacacactgctatcgggagcccccccctcccacagttgaatttccagagtctgttattccagattccgagcctaattgctcagtggccttgaacactgcaaaagcgccgttacaccgtgcatgacctactgcccccaaacacttaatttggagtgacgccctgtggtggtagtaaccaatgccgtgtagtggtccaccccaaaaagaccctcgcaccgtcggcggtctgaccttgctgagacaacacttcgcctgccgcagccttgcgcaaaccgatcatcactggcagaaacctttcgcggaaagcctgtggttgcttagcgaaacaagcctcgatcgacttcaaggcctctttgcattcatgctcctcaagcattgcgaggtaaaacaccatctggcgccaggcataagctgtgttcttgagcataatcaatcgagcatgatagagaccggtgtgcatctgctgccgtttgcagacccactcaaaactcgcctgggccatgccccctagccgagtactcagcaaacctttcaacccgagctcgtcgaaaatcagcgcaaggttttgcgtcgttaaaatctgctgttgctcaaggatcgtgccattggttgcagggtgccaagtgcccagctctgccccagcccgctttgcgcataaggcagcaaaagcctcacttgcacctcgcgcacgccgtcgccctcttgtgacgaagccggccagttcgtcggtatcgatagagtagtaacgtgcataaagggagcctgcgattacccgactcgctcgccgagcagtgtcagcgaacttggttgagaactgccccatgaagatatctgcagcgacctcctccacaaagggaaggtccagctccgcagtgtccaccagcgttccaaattcctggagaagcttgttaggaaggatggcgtaggggaacgcatgaagcgtcaatgccgaagactcaacgagagcctggctcgctgcacccgctgccccggtacctgactgtcgatcaccctcaatggctgcaatccaaggcaactcactgaagcccacctgacgttgaagattcaatagcaacaacgaacgcctaaggcggaaagcctgataggtggaggcatagaccttcctcaacgcttcgtcgtgcagccctgcgctactcagctgtgcggtcatcgcgggcagtactcgtgcgactgtgtcacccgaagtaatcagcccatgctcaatcaactccctgattgttccgctgcgacagcgttgaacacgtcgcagaattggcgcgggtatcgcgacaccttcgcccagtgcgcaatccaccgcctcttgaacatcaagcggcttggccaaatcggcaaaatcaaagatgccactgtgtgcggggtacttagagaggcgctttgcgacggcacgcgcgatcagatgatgctctggtcctgatacctggcgaagctggtcctcccggaacgcgaggtgagagccggaagccggcgcaccatgtttgcgcacaaagtcatcgactattcgccgtatgcgacccacctgacgccctgtaagcgactctgcatcgcgagagcattgctctagcaacagaaacaattccgctacacgatcaggagagcgtttgttgatcccgagttgttcataacgcatagccaattcggctgcctgttcgtgccactttgccgggaagatacggcatggccagcccacctggtacgtcaggaggaaatgcgcgacggctgaatcataaagaggtagacgggcttcgatcgcctgtttctgagcaacgatttgagcccgcggtggcaaggttgaaagtaactgcttgacctcacctgcattggcgatgtggacctgcgtagctgataccggtagctgtgcggacgttgccggaaagaaacgcaatcggtcgaaaaacggaacaatcacgtctagcagtgccctggcctcgtcgttgcgacgctggctcgacagccatgccacggtcagtaacgcggcttcttccggaacatcaacgcgatagtcacaacgggtcagacgctgttgcagatgttcaaggccttcgtccgtcagatgccaagcgttgagatccagtcgctcaaaccctctgcgaatgccggaaatagaagcgaccaattcacgctcatagtcagttaactcgccacccgccaacaggttgccggtcgcaaagccgcctgtaatgacttccagcgtcacccagacaggtatctcggcaagcggggttcgcgagccatactcggcggtgccttgcagcatgtgcgcaatcacttgttgccactgtgagatacgtctgtgggcattgaatcgggcgagagggccacgggtttgatcgtgtgcaatcaatgccttggaaagttggaagaccgcataacccgcgtccatgccagtcactccgtttgctctggagaggtatccagattgccttttaatgtgatgggtccggaggctggattcgaaccagcgcccacccggttaagagccgagtgttctaccgctgaactactccggaacaggggcgcattgtcgggcaaccgctaaggaatgtgaaggtcacagatggtcattaagcaatggctgacgacactgctctttttttgtcagaaccagcgggaattattcaagtagcggcgtgccagcagatgtattcggtactgttacaccgttgctgagataaacacagccctcacgaccgatgaggtcaactgtagttggcttgccggcgatgtcggtgtgtcatttgtgcatttgttactgacgtatcgctattgccggcaagccggctctacagttgatttgcagcggatgttggagtggagttattcgaggttacgggctgagttactcagcgctctcgaacactgcaacaacgccggcgccaactgcttctccgcatccgccctactccaccgactggtcggcgccaccacatgcaccgccgccaccggtcgaccattggcacccagcaccggcgcaccgatggtcatatcgcccaggaacagctcttggccgttcactgcatagccctgttcgcgtacctgttgcaacgacgccatgatttcgtcgacttcagtcagcgtctggctggtgtgggcaatacgctgactgttctcgatcaacaccagcgcttcctcctgcggcaacgcgctcagataggcgcgtcccgacgccgtgcaatacatcggcacccgcgagccgatcggcatgtgcacgggtacgaagcccgagctgacgaaccgtgcgatgtaggtcatgtcgtagccggctggctcggtgaggcacgaggtctcgccggtcagccgggtcaactccgacaggaacggattcgccacctcaatcaacgaatgcgcatccaggtaactgaagcccagctccagcacccggggtgtgagttggtaatgccgggtgcgggagtgtttccgaaggtaacccaggctttcgagggtaaacaccatgcgctgggccgagcttttggtcatgccggcggcctcggccacctctgcaaggctcatgctgcggcgctgtgcgctgaatgccttgagcaccgacaggcctttttccagggattggttgtgcagactgttgcgttcttcggacatggcggactcacggtcaggtcgatcaggcgtggcgatatttttaacccaaatcacagaaatagaccattaaatatcgcatatcgatacgaatggttcattttttctattttccatagcgctatacgatttttattgatcgaaatggcacagagcttgcgatttcatcggcagccgcttgcggtactgactttccgttttccttctggagtaacccgatgaacagtctttcgcccttgtttcgccgccttgccttcggtctctgtgccacgttctgcgtcagcgttgtgcacgccgagagtgcgtcctcgtacaaagtcggtgcaacagccagtggttcgccgtttacctttctcgacatcaagagcaacagcatccagggcgtgatggtcgacgtggccgaggcggtgggcaaggccggcggctttaccagccagattgagcagaccaacttcgccgcgctgatcccctccctcacttccggcaagttggattttatttccgccggcatgctcaagaccgaagaacgcaccaaggtcgttgacttcagcgctccggtgtatgcctacggtgaaggcctgatcatcaacgccgacgacaacaccgcctaccctgacctcatgcctctcaaggaccaagtggtcggcgtgcaggccggcactgtcttctatgaccagttgaacaagctcggcatcttcaaggagatccgcacctacgactccatcggcgagatggtccgcgacctgtccctgggccgtatcaaggccgccgtgggtgaccagccggtggtggcctaccagatccgccagaagctgttcaaaggcgtgaaactggcgccggactacaagcccactaatgtcggtgaagtgtgcctggtggtgcgcaagggtgacgcgcaaaccctggagcgcctgaacaccgcgatcgccagtatcaaggcggacggcaccctcgacaacatcctcaagaagtggggcctggatacccaggtgcgcccatgaacccggcggagttcctgcaaaacgcccaggacttcttgccgatcctgctgcaaggcgcgtgggtgacgattcagatcaccgtgctgtcattcctgctcagcagcgcgatcggcctggtgctggcgttgctcaagctgtcgccgatccgtgcactgtcgtgggcggcgagcaccatcatcaacgtgatccgtgggctgccgatcatcgtgcagttgttctacatctacttcgtgctaccggacatgggcgtgcacctcaccgcgttctatgcgggcgtgatcggcatgggcatcgcctactcggcgtaccaggccgagaacttccgcaccggcatcattgccgtcgaacagggccagcgcgaagccgccgaagcactgggcatgcgctcggcgctgatgatgcgccgggtgatcctgccgcaagcctttcgcatcgccttgccgccgtatggcaacacgctggtgatgatgctcaaggactcctccttggtgtccaccatcaccgtcgcggagatgacccgccagggccaactgattgcctcgtcgaccttccagaacatgaccgtctacaccctggtcgccctgctctacctgctgatgagcctgccgctggtgtatggcctgcgccgcatggaacagcacctgggccggaggaaaaaagcatgatcgagatacgccaactgcaaaaacactacggcagccaccgcgtgctgcacggcgtcgacctggacgtggccaagggcgaagtggtgtgcctgatcggcccctcgggctcgggaaaatccaccttgctgcgctgcatcaacgcgctggaagcctacgacggcggccacatcaacgtgttcggcgaaaccgtgcagcgcggcagcaagaccgtgcacgccctgcgcagccgcatgggcatggtgttccagcgcttcaacctgttcccccatcgcaccgtgctggaaaacgtgatggaaggcccggtgtacgtcaaaggcgaaccgcccaagcaggcccgtgaagaagccctggtattgctggaaaaggtcggcctgagcgccaaggccgacgcctacccggagcagctctccggcggccagcaacaacgcgtggccatcgcccgcgccctggcaatgaaacctgaagccatgttgttcgatgaacccacctcggccctcgaccctgaactggtcggtgatgtgctggcggtgatgcgcaccctggccgatgagggcatgaccatgatcgtggtcactcacgaaatgggctttgcccgcgaagtggccgaccgcgtgtgcttcctgcatggcggctacatcgtcgaaagcgggccggccgaacaggtgctgggcaacccgcagcatgcgcggacccaggacttcctgcggcgcgtgctgcaccccaccggtaacacgcggagcctgtcatgaagtctttgtggtcagccacggctccatctgtggtgccgacgcctgcattgggcgagtcagtgacggtggacgtggcgattgtcggcgcgggatataccggcttgtcgacggcgctgcatttggccgagcgcggcgtcagcgtgtgcgtactggaggccaacgagccgggctggggtgcgtccggacgcaacggcgggcaggtcaacccgacgctcaaatacgacccgcagcaactggtgcagatctacggaccggagcgcgccgagccattgatctcgaccgtatcgagttcagccgacctggtgttcagtctgatcgaaaggcatggcatcgattgcgcgccggtacgcaaaggctggatgcaagtgtcgtacagcgaaaaaggcgtcgccgggttgcacgcacgggcagatcaatgggccaggcgcggtgtaccggtgcagcggctggatgccgcagcggtggcttcgcgcatgggcagtgaggcgtttgccggtggctggctggacggtcgcgccggggcgattcagccgttggcgtatgcccgtggcttggtgggtgcggcgttggcggcgggtgtgcggatccatgggcagagcgcggtgaccgggttgcagcgccagggttgcggctggcaattgcagacggctggcggtgcgcaggtcacggccgatcaagtggtgttggccaccaacggctacagcggcaacctgtggccgggcatggcgcagagcatcctggcggcgaacagttttatcgtcgccaccaaacccttgagcgggcgcgcagcggacagcatcttgccggggcaggaaaccgtctccaccgcacaacggctgctgctgtactttcgcaaagacagccatggccgcttgctgatgggcggacgcgggctgttcaacgaccccacgtcacccacggatttcgcccacctggaacgctcgctggcgctgctgtttccgcaattggggccactggaattcgagtatcgctgggcgggccgtattgcgatcacgcgggacttcatgccccatgtgcaccagcccgcaccggggcttacattggcgctgggttgtaatggccgtggcatcgcgctgtgtaccagcctggggcagcaattggcggggcggttgtgcgacagcacggcggatttcgcctacccggtgacgccgttgcagcgcttgccgatgcatgggttgcagcggttttacattggcgcgggggtggcgtggtacagcttgctggatcggctcaatgtgagctgaacagagccctcactcacaccactccccatgtgagagtgggcttgcccgcgacagcggtgtgtcagccgctggatgtgctggctgatgtaccgccatcgcaggcaagccagctcccacactggatctccttttccgggagaacctattgcacacgtaaagcgattaatactctcaatcgccaacggcgatcgctcccatgaacggggcgcaccctcaaaacaccgaccacccaatccgctcactcaacaattccaacgccttcatccccgccagcgagttccccgccgcattcagctccggcgaccacacgcacaccgtaaactgccccggcaccaccgcgacaatcccgccccctaccccgctcttgcccggcaagcccacgcgataggcaaaattgcctgcctcgtcgtacagcccgctggtggccatgatcgagttgacctgcttggtctggcgcgccgtcaaaatctgttcgctgctgtgggcgctcacgccttcgttggccaggaagctgaacgccctggccaagtccaggcagctcatctgcaaggcgcagtagttgaaatagctgtgcagcaccgcgtccacgtcgttgtggaagttgccaaaggatttcatcaggtaggccatggccgcgttgcgggcaccgtgctgggcctcggattcggcgacgacgctgttgaccaggatctgcgggttgcccgacaggcgccggacgaaatcgcgcatcgacaagatcggcacggcgaagcgcgattggttgatgtcgcagatcaccagcgcaccggcgttgatgaacggattacgcgggcggccacgttcgaattccagctgcaccatggagttgaacggctgcccggaaggctcgtgccccaggcgctcccagatggtttcgccaccgtggtcgatggcctgcaccaggctgaacaccttggaaatgctctgcaccgagaacagcgtgtcggcgtcaccggcgcagtaggccgagccgtcgttgccgtacacggcgatgcccaattggttggcaggcacatcggccaatgccgggatgtaatcggcgactttgccgaggccgatcagggggcgcacttcgtcgaggatcgactccagcagcgcctgcatgtcttgtccagtcatctgtctttgaatcggtggtaagcggggcgcggaggatacctgaaacacgcaggtcaagcttcatcagggccgcttcgcaccccaacacgggacaagcccgctcgccacagagggagtggggactccctcgccacagctcgatgttgcgtgcgctcaaaagtgcgccacatccgacacccgctcatccagcacatcccgcgccagcgcccaggcccggtccctggactccaccaccagcagcggatagccccaggccttgccgaacatcgcggcaaacggcttgagtgccaggcgctgcgcggcactgggttccacctggatcatgcctttgacataggtgcgcagcgcctgcttgtttttcttcatccagatcgacgcttgcttgcgctcctcatgggagtgttcgtgattgttctcgtccacggatttttcgtgcagcagcaggaagggttgctggcgggccagcaggctttcgaacacggcgaaggcatcctccggcccgccttcattgggcgcatcaaagacgattttcaccaccgggaatgttgaactgtcgagtcgcatggccgagctccttgttgagaattgatctcactataagggccagaccactggacggcattgcacagaatagccagactgtttcgcaattcagccaacctgcgatcccttgtcatgaaacaccatcgcctggaaatgcacgatccgtcactgtccagagacgccgacgtattcccccgcgccgtagtggccgtaggggccaccgccacgtcggatacctgggaacatacccagcatgcccatcgcaaaggccaactgatgtacaccttgcgcggggtcatccattgcgagattgaggccggtatctggatcgtgccgccgcaatgcgcgctgtggattcccggcggcacgccccacgcggcacggggggctggcgctgcggaagtctattgcctgttgatcgaccccgatgccgcctgcgccctgccccggcaatgctgcacgctggcggtgtcggccctgttgcatgagctgatcagcaaggcggtgagtttcccgcaactgtatgacgagcacggcgcccagggccgtttgatcagtaccttgctggatgaattggccgtcgcgcctgttgaagccctgcacctgcccatgccacaagatccgcgcctgcgtcgcctggccgacagcctgctggctgaaccggcggacaagtccaccctcggtcaatgggcggtgcgcatcggcatgagcgaacgcagcatgacgcgcctgctgctggaggaactgggcctgagttttggccgttggcgtcggcagttgcatgtgatcctgtcgctgcaacgcctggccaggggtgagagtgtgcagcgcgtggccctggacctgggctatgagaacgccagtggttttatcaccatgttccgcaagaccgtgggccagccgccggcgcgttatctggcggaccgcgccggggccttgcactcgctggcgccggcgacgattgcgctgaactgaaggtattgcctacccggatctgcgggcctgctcgccacacagtcaactgtccagatcagccaagcccaaatgctcacgcaacgtcgccccttcatacgcggtgcggaacagccccttgcgctgcaaatgcggaatcacgctctcgacaaactccgagaacgagcccggcaaataccccggagagatcacaaacccgtcgcaaccgccctgctcgaacaactcggccagttgatcggcaatctgcgcgccggtacccaccaattgcggcacacgtacgctgctggcgaagatgcgtccgagttgctccaaggtggtttgcgggccttgcatcaacagcttttcagccgccgccgggtggatcagcggcgactgggcgatctcggccagcgtcgccgagagcgggaatggcgaaagatccacattcaactgcgaagccaacgtcaccagccccaattccggacgggccaatgcattgtgctggtcgcgcttggcacgggcctcagcctcgctgccgccaatgaacggcatcaccgccgtgagcactttgcaactgtcggcgtcacgcccctgctgcaccacctgggcacgcacgtcatcgcgaaacgcacgcatggccaccaagtgcgggtgaatggtgaaaatcgcctcggcccaacgcgcaccaaagcgccggccacgcccggaagaaccggcctggatcagcaccggtcggccctggggcgtgcgcgggatattcagcgggccttcaaccctgaaccattcgccctggtgctgcaccgaacggatcaatccagggtccgccagtacgccgctttcgcggtccagtttcagcgcgtcctggccccagctgttccacagtttcaacgcgacttcgacaaactcatcggcgcggtcatagcgcaggtcgtgctccaggtgcttgtccttgccgaacaggcgcccttcgctgtcgttcatcgaggtgacgatattccacgccgcacggcccttggacaggtggtcgagggtggcaaattcacgggcgatgtgcgccggttcgtaataggtggtggaccgcgttgcacccaggcccagcttgctggtcttgccgaccaggtaagagaggatcggcaacgggtccaggcgcgtggcgtcctgggcgccgtagcgcaaggcgaactcgcgggagccgcccatctggtcgcccacggccaggcggtcggcgaagaacaggaagtcgaacaacccctcctccaccaccttggccacccgtgcgtagtactcagggtcgaggtaattgccaacggtttccgggtggcgccataccgcatggctgtgcacgaccggcccactcagcaggaacgcggataaatggatctggcggctcatggcttgggcgtccacacgttgatgtcgttgatcttcaacgccctggggatcagcttggcggcgtagtaggtgtcggcgatgcgctgttgctcggcgaggtggtccagcttgaccgggatgatgtcgtagctgcggcggctattggcgcgctccaccgtggccggggggatattgccccacagcgggccaaggatggcggcggcttccttgggatgggcctttacccattggccggtctcgcgcagggtgtcgaaggtcacctgcaacacgtccgggtgggccttggcgaactttgtcgtcgccaggtagaaacggttgtagtcggccaggccgttcttgccgtcggcgatcacccgtacatggtgatccagctgttgggtggcgaggaacgggtcccagattacccacgcgtcgacactgccattggcgaacgccgcgccgccatccggggcttccaggtaacgcggggtgatatcggccagggtcaggccggcctttttcagggccgagatcagcaggtagttgctgcccgaacccttggacacggcaaccgtcttgcccttgagctcggcgatgctgtggatcggcgacgtgtcctggacgatgatcgcctgggcgcccggcgatgcgttttcctgggcgtaataggtcagcggtgcatcggcggcctgggtgaacagcgcgaaagcgtccgccacatcggcgtgcaggtcgacactgccggcgttcagcgaactgagcagaccggtgctgaattcatgccagttcaccgtgaaccccaggggcttgaggcgctgttccaactggccattttgcttgagcaggatccacagcgtggatgagcgctggtagctgatatccatggtttgctcggcctgggccgccgtggcggcgaacagcaggctggcggcgacgattaggtttttgaacgtcatgggaggccttggcgaggaagaaatgaagggcgctgcttatgccaaaaaaccacgtcaggcctggcaataaagcttgttcaattatattaacgatgagaaatgatgaaagaatcttataattctatggttatgcccaattcataggcggcagggaaaagcgtcctaagctcagatcgaaagagtatttaacgaatagtttttagaactttaagctcaggcctatttcgtcacagatcgagctcgccatgtccctacgtcaccccttcgccgcactcctcggcttgctggctctgtccgtcgccatcagcgcgcaggcccaggaaaccgtacgcatcggttaccagaagtcctcgaccctgatcaccctgctgaaaacccagggcaccctggaaaaagccctcaaggccgacaacatcgacgtgagctggcacgagttccccagcggcctgccgctgctcgaagcactgaacgtgggcaacgtggacatcagcgccgacgtggccgacaccgtgccgatcttcgcccaggcagcccaggccaaactcacctacttcgcccaggaagccccctcgccttcggcccaggccatcgtggtacgcaaggactcgccgatccagaacctggcggacctcaagggcaagaagatcgccgtgaccaaggccgccggcacccactatttgttgatcgccgcactggccaaggcggggctggccttttcggatatcgaaccggcctacctgtcacccgccgacggtcgcgcggcgttcgagaacaacaaggtggacgcctgggtcacctgggaacccttcctcaccagcgtgcagcgccaactgccaacacgcaccctggcggacggcgcagggctggccagctacaagcgctactacctgacgggtacgccgtacgccaaggcccacccgcaagtgttgaacgtggtgtacgcgcaactggaaaagaccggccaatgggtgaaaacccacccacaagacgcggccaaagtacttggcccgctgtggggcaacctggatgtcgcgacggttgaagcagccaatgcgcaccgcagctatcaagtgcagcctgtgacgattgatcagttgggcgaacaacagaaaatcgccgatgcgttcttcaaggcggggttattgcccaaggccgtggatgccaaggatgtacagacctggaagccttgaggcagccattgtaggagctggcttgccggcgaaagcgctgggtcagccgcttttccgttgctgatctaccgctatcgctggcaagccggctcctacagggggcgtcattcgcaggcaaaaaggtgcccccccgtatcccccggtgtcagggtagttgtcgtgtcctccgctttttaaaagtattccgggggcggcaagagtaaggtcatgcctttctattcagaagaacgcaaagctgcgctgttgaaaatga

SEQ ID NO: 118 - DNA, 405762 bp, Pseudomonas nodulensis
  misc_feature (88327)..(88361): n is a, c, g, or t
  misc_feature (298559)..(298559): n is a, c, g, or t
  misc_feature (396404)..(396481): n is a, c, g, or t
tgacacccgcccagcgccacgagggaaaagaccgggaaatcttggcccggagggcggcaatctatgggcaagcgagagaaaaaaggcctgaaaggtggtcaggcgagacacgcaactggaaccctatcgggacggtgtacctcaatcccgaaagggagctgacagttgtcgtgaaggtcgcctagcaagacgggagacacgacaactaccttgaaaaacgccggtatccacgatgcgaagcgagtcgctcttgatcctgcttttgatctaaggcgccccgtcaaacacgctggccggaattcgacagggatttggggggtaaaccggcagggatgccggtttagccgccccgcgccatggatggcgcgtggcggcggccccccaaatacctgtcggattacgggcacaccgagcctaggcgaggtgccgagtgttggggcaagagcgttttgcttacttttgactgggccggcattccggcttttcaaaagtgagccgccgtaagggcggaaccattagcagccgttacctaaataacggatatgtacctggtctgatccaacattctggtcggctgtcaggccgccttcgcgagcaagcccgctcccacatttggatcgcggggcaacagttggagagtggttggctgtcaggccgacttcgcaggcaagccagctcccacatttggatcgtggggtggcagttagagagcggttggctgtcaggccgacttcgcaggcaagccagctcccacatttggatcgtggggtggcagttagagagcggtcggctgtcaggccgtcttcgcaggtaagccagctcccgcatttggatcgtggggtggcagttagagagcggtcggctgtcaggccgtcttcgcaggcaagccagctcccacatttggatcgcggggcaacagttggagagtggtcggcagtcacaacagcgtgcgctccagcgcctttttccacgcagcataacgccccgccatagcaggatcatcctgcggctcaaaccgctcccgctgccgctccagcgcgcccaacgcgtcatcactcccccacacacccaacgccctccccgccaagtgcgccgcgcccagcgccgacacttccggcgacaggctgcgcaccaccggacgttgcaacagatcggccaaaaactgcatcaaccaacggttacgcgtcgcaccgccgtccacccacaactccttcaacgggctaccgatgtcctgctgcatagcctcaaagacatcgcgaatctgataaccaatcgactccagcgacgcccgcaggatatgcgcgccggaggtggcctcggtcagcccgcagatcaaaccgcgcgcatcagcctgccagtgcggtgcacccagcccggacagcgccggcacaaaatacacaccaccattgtccggcagttgcgcagcctgctcggtgagagcatccagggattctcccgccaccaggcgcgaggcccactgcacggcggcgcccgtatggacgatgttgccttccatgccgaacgtcggttggccgccgtcgtgccaggccagcgtggtggacaaaccgtgagtcgaggcaatcgggccgctcatgggcgtcattaaggaagaaccggtacccagtgtcgccttcaccagccccggcgcgaacccgccctgcccgtacagcgcagcgtgggagtcgccgatcatcgacatcaccgggatgccggcgggcaaaccacccgccgcgacggtttcagcaaagaaaccggcgctcggctggatcggggccaatgccgccagtggaatcttgaacagtgccaatagctccgggtcccaggcgcaggtgtgcaggttgaacagttgcgtgcgcgccgcgttggagtagtcggtggcaaacacctggccgccgctgagtttccacagcaaccagctgtccaccgtgcccaggcagatatcaccggcagcggcacgtgcgtgcccctcttcaaggtggtcgagaatccagcgcaacttgccggcggagaacatcgggtccaaggccagcccggttttttccaggatcagcgcctcatgtccctgctcatgcaattgggcacacaacgcggtggagcgccggcattgccaactgatgcacggcgacagcgcctcgccggtctgccggtcccaggccaccaccgattcacgctggttgctgatggccagcgctgtgatcgggcggtccacctgggccaggcattcctcaatggcggccagggtgctgtgccagatcagcagcgggtcctgctcggagaaccccggctgcggatgggtgatgctcagcggccgcgagcctcgggcaattacctgcccgcgcgcattgaccagcaccgccttggcgttgctggtgccttcatctatcgccaggatcagcggagtgttgtctgtcatcgcattcaccgcaaccgagtggcagccgccacaatcccagccgcgtcgatgttatgcaaggcgcgggtgggttcgcgggcgccggccgcggcatattcgccatcgccgatgcccaggcgcaccagggcaatgcccagcccggcttcggccagcacttcggcgaccaggctgccgatgccaccgttgatgttgtgctcctcgaccgtgatgaccgcccgcgtgccacgcagggcgctgagcaacacgtcacgctgcaatggccggatcgacgacaggttgatcacctgcgcctggatgccctgctccgccagcacccgtgccgcgtccaccgcttcatgcaccaccgagcccagggcgacgatgctcacgtctgcaccctgacgcaggatatccacctgccccggggcaaattgatagtcgcccgtgtgcacgtccggcaacgccttgccatccagacggatgtacaccgggccgtggtagcgcagcgcgtagtcgacgatctgccggcattcaagcgcgtcggccggggcaaagatctgcacgttgccaaaaccgcgcatcaccgaaatgtcgtcgaggctgtggtgggtgctggccaacgggccgtaactggcgccggcgttcaggccgaacatcttcacgttggcctggttgtagcaaacgtcgactttgatctgctcattggcccgcgaaatcagaaatggcgccgcgttgcaggtggcggcgatcttgccgcccagtgccaggcccgccgcgacgctgaccagcgactgctcggcaatgcccacgttgatcagccgctcgggaaagcgctgtacaaacggaccgatcttagccgtggaggtggagtcactgaccaccggcaccacgtccagtccggcatcgacggcggcaataaaggcctccaccatgacgctcgccaggtgttcactcgccatgattcaactcctccagtgccgcgttgatttcatcacccttgggcacgcggtggtgccattcgggacgggcttcgataaacgacacgcccttgcctttgatggtgtgggcgatcagcacctggggcgcaccggtcctggcctgcatgttttccagggcctcgatcaactggcccgcatcgttgccatcgcactcgctgacgcgaaaaccgaaggccgcccatttcacgtccagcgggtccagcggcatgatgtccgccgtcaagcccgccagttgcagcttgttcttgtcgacgatcacgaacaggttatccaggccgtatttcgccgccgccatcgccgcttcccagttggagccttccgccagttcaccgtcgccggtcagcacataaatgcgttttttgctgccggacatcttcgccgccagcgccagccccaccgccaccggcaggccgtggccgagggcgccggtgttcagttcgatgccaggggttttctgccgcaccgggtggcccggcaagtgggagttgaagtgctggtaggtgggcagccagtcgacggggatgtagcccgcctgcgccaggcagcaatacaaaccgccgacaccgtggcccttgctctggatatagatatcgcgctcagggtcgtcggtgcgttccgggccggtattgagaatgcggaaatacagggtcgcgagaatatcggtttccgagaggtcggccccggtgtggccgccggccggtgagtcggcattcaggcggatcacatggcgccggatcaggcgggcctgttctttgatctggtgggcgtcgtactggaaggcattcatgcagcggctcctttgaggctgaccacgcggggtgaaagtgtgcaaagctgtatttgaatatttattcagcagtgacaatatatttctatttagacgccgaacgctcgacaggtcaagtgaatgaccggggggaaaatgaaataaaacctggaaatgtccctcagacaaacggccaaaatcccacacgcgcttctctatcccgtggctttgcgccggatgaaagtcgcgatccagaggcctactggaaaaattaagcgcttgacattgccacggtggcactggaatctgaattaacagtcaagcacgcataaatattcacggcgcttgaaagcactccaaaaaaaataaatcaggagaacactgtggacgccaaagctactgtccagcatccggccgaactcaagccgccccaccgcccccggttggtgaaactgcttcccagcaatatcggcggcccgctgatcggcctgatgttgctggtgctggtcttctccttcagttccgaattcttcttctcgctgcgcaatggcctgaacattcttgaccaggtcacggtgctgggcatcctcgcaattggcatgaccgccgtgatcgtgatcggcggcatcgacctgtcagtggggtcggtgctggccttctcgatgatgatgctcggctggctgtaccaggaccaggcggtgccgctggggtttgcgatcccgatctcgattgccagcggcatgctcgccgggctggtgtccggcgccttgatcacctatgccaagctgccgccgttcattgccacgctgaccatgatgtcggtggcccgtggcctggcgaacatcctcaccgaaggccggcagatcgtcggttaccccgactggttcaccagcctggccacggtgcgtcacttcggtttcctctcggcaaccgtcgggctgttcctggtgatgctggtggtagcctgggtgttcctgcgctttcgtgccggtggccgtaacttgtacgccatgggcggcagcccggaagtggcgcgcctgtccgggatcaaggtgcgggcgatcaccctgtgggtgtatgccatcagcggtgcgctggccggtatcgccgccgtaaccctggccgcgcgcctggactcgtcccaacccagcgccggcctgagcctggaactggacgccatcgccgccgtggtgatcggcggcgccagcctcagcggcggcgtcggcagcatcggcggcaccctggtcggcgtgctgatcattggcgtgctgcgcaatggcctcaacctgctcggcgtttcgcccttcattcaacaagtggtgatcggcgtggtcatcgccctcgccgtgaccatcgacaccctgcgacgccgctccagtactgcccgttaaacctgttcgacagttgacaccctccaacaataaaaccaggagtcaccgacatgttcagccccaagaaactgctgttggccaccgccctcgcggccgccaccctcaccgctgccggcaccacgtgggccaaggacctgaccatcggcctggccgtggccaacctgcaggccgactttttcaaccagatcaagcaatcggtggaagccgagggcaaggccaagggcatcaaggtgattaccgtggatgcccagggcaactcctccacccaggtcagccagattgaagacctgatcactcgccagatcgatgtgctgatctacatcccggccggtgccaccgccgccggtgtgccggtcaaggcggcgaaagccgccggtatcccggtgatcgccgtcgaccgcaacgcccccgacgcgccaggcgatacctttatcgccagtgacagcgtggccggggccaagaccctggccgagtacgtcggcaagatcaccgatggcaaaggccgcatcgcgatcctgcaaggccagctcggcaccacccccgagaacgatcgcgccaagggcttcgaagaaggtttgaaagctttcccggacctcaaggtcgtcgcccagcaacccgccgaatgggctcaggacaaaggcttcgccgtggcccaggacctgctccagcgtgacccgaacatcacggtgttcttcggccgtgccgatgccatggcgttgggcgccgcccaggcggtgaaggtcggtaacctcgaccacaaggtggtggtggtcggttttgacggtgacgtcgccgggctcaaggccgtggaaagtggcgtgctgaacgcgaccatgacccaacagacccagaagatgggccgcctggccgtggcgtcggccatcgacctgaaagccggcaaggctgtgcccaaggagcaactgttgcctaccgtgctgaccaccaaagaaaacgtcgcgccgttcctgcaacagcacccgtaagccttggaggtcgtcatgcaagcagcagccctggacaccgctcgcgccgacgcggtgctgtgcctgcgcaatatcagcaaggcctatgggccggtgcaggtactgtcgcaggtcaatgtggacatccgccccggcgaagtgctggccctgctcggtgagaacggtgcgggcaagtcgaccttgtcgtcgatcatcgccgggctggtacagcctgaagccgggggcagcatgacctggctcggcgcaccttacgcaccggcgtcgcccggtgcggcactgagcgccgggatcggtctgatccaccaggaaatccgcctgctgccgcaattgtcgatcgccgagaatatcttcgtcggccgcctgcccatgcgtcatggacgggtggaccgcgcgtacatggaggcccaggcgcagatccagttggagcgcctggggctcaaggtgccggcatcgcgcaaggtcgaaggcctgagcgtggcggcccagcaattggtggaaatcgccaaggcgctgaccctcaaggccagcctgttgattctggatgaacccactgcggcattgggcggcgaagaaaccgagttgttgttcaaacaggtggaacggctcaaggccgagggcgtgtcgtttatctatatcagccaccgcctggaagaaatcgcacgcatcgccgaccgcgtgctggtgctgcgcgacggtcgccagattgccttgcacgccaccgcccaggtgccggtgcgcgagctggtggaacagatggtcgggcgtagcctggagcggattttcccggccctgcaagcaccacaggatcgcgtgatgttgcaggtcaaggacctcagctgtcgcgagtttgccttgcacggcatcgacttcagcgtgcgcgctggcgaagtgttcggtattgccggcgtggtcggcgctgggcggaccgagctggtgcgcacccttgccggcgcggcacaggatatccagggccacctggtgctcgacggtgaagtgcgccacctgcgctcgcccttcgaggcaatccaggccggtgtagtgctggtgcccgaggaccgcaagcagcaaggcgtggtggtggagcaccgcatcgaagacaacctgatctacggcaacaccgacctgttggacaagcgcggctgggtgttccctgccccgctgcgcgaattcgcccgcacggcggtggcgcggttgggggtgaagggtgcgccgcagtcgcgaatttcgagtttgtctggtggtaaccagcagaaggtgatcattgccaagtggctggcgcgcaatcccaaggtgttcatccttgacgagccgacacgcggcatcgacgtgggcgcacgggcggcgatctatgaagtgatcgcggacctggcggccaagggcatggcggtgattgtggtgagctcggacctcgatgaggtgctggggttgtcccatcgggtgatggtgatgagccggggccggcagatggggatcctggagcgtggcgcggccacccccgtttcggtgatggaaatggcgactgcttaaccagagaacaccgctgttttttgtgggagggggcttgcccccgatagcggtgtatcagtcacacacttttcaactgaaccactgccatcgggggcaagccccctcccacaggggtcagctgtgatttcaaataacggagttatccatgcagctttttagtcttgaaggccaagtggcctttgtcaccggcgcaggcagcggcattggccaggcgattgccgtggggctggccgaggcaggtgcggatgtggcctgcttcgatctaccgggcagccccggcatcgccagcaccgtcgaacgcatccaggccttaggccgtcgcgccctggccttgagcggtacggtcaccgagcgcgccgcactggatgcagcggtcgcgcgcaccgaagccgagctgggcgaactgagcgtcgcggtcaattgcgccggcatcgccaatgcccaggccgccgaagacctcgaactgcaacgctggcaaaccaccctggacatcaacctcaccggcattttcctcagttgccaggcccaggccgccgtgatgttgcctcggggaaaaggagccatcgtcaatattgcctcgatgtccggcagcatcgtcaaccgtggcttgctgcaagcgcactacaacacctccaaggccggcgtgattcacctgagcaagagcctggcgatggaatgggccgacaaaggcttgcgggtcaattgcatcagccccggctacaccgccacgccgatgaactcgcgcccggaagttgccgaccaggtgaagatctttgaacagaccacgccgatgggccgcatggccagcgtggaagaaatggtcggcccggcgattttcctggtcagccaggcctcgtctttctgcaccggtgtcgacctgttggtcgatggcggctttgtgtgctggtaggagttcgtcatgtcccaacgattcagcggtaaaactgtggtcatcaccggcgcctgccggggcatcggcgccggcattgccgagcgcttcgcccaggaaggcgccaacctggtactggcttccaacgacttggaacgcgtgaccttcaccgccgaccaactggcccgggaataccaggtcgacaccctggccctggccatcgacgtcacccgcgaagacgatatcgaaacgctctaccgcgaaggccacgcgcggtttggcagcatcgacgtgtcggtgcagaacgccggcatcatcaccatcgaccattacgacaaaatgccccgcgccgatttcgacaaggtgctgcaggtcaacaccaccggcgtctggctcggctgccgggaggcggccaagtacatggtcaagcaaggcagcggccggctgatcaacacctcctccggccagggccgccaggggttcatctacacgccccactacgccgccagcaaaatgggcgtgatcggcatcacccagagcctggcgctggagctggcgcggcataacatcacggtcaacgcgttttgccccggcatcatcgaaagcgagatgtgggactacaacgaccgcgtgtggggcgagatcctcagcaccgacgagaaacgctacggcaagggtgaattgatggccgaatgggtcaggaacatccccctgcgccgcgccggcaaaccctcggatgtcgcgggcctggtggcgtttctggcctcggacgatgcggcctacctgaccggccaggcgatcaatatcgacggcggcctgatcatgtcgtaagggtttggtatcctcacggccattgagtcatgccttttactataaagagccctgaggccttcatgagccagatcgaagaacagcgcctgatcaccaagatcgcgagcctctattacgaagaagggctcaagcagtccgagatttccgcgcaactggacctgtcccaatcctttatcagccgcgccctgcgtcgggcgctgcaggaaggcgtggtgaagatcacggtgatgcgcctgcaaggcctgcacctggagctggaaacccagttgcaacgccgctacggcgtgcgccgggtgatcgtggtggaagccaccgagccgggcaatgacgagagcatcaagcaggccatcggttcggccgccgcccactacctggaaaccagcctgtcgccccaggaccatatcggtatttcgtcgtggagcagcaccattcgcgccatggtgagccacctgcacgcgcaaccgggcaaacaggcagcccaggaagtggtgcaactgttgggcggcgtcggccacaagggcgcgtttgaagccacgttgctgacccagcgcctggcgaccctgctcaactgcccggcgtttctgctgccctcgcaaagcatcgagcaatcggtggagagcaagcagcgcatcgtgcagatggaagaggtcaaggaagtgctgcagcgctttgacagcatcaccctggcgattgtcggcatcggcgacctggagccctcgcaactgctgcgcaacagcggcaactactacaccgaagacatgctgcgcctgctcgccgaacgcggcgcggtgggcgatatctgcctgcgctacttcgatgcccagggccagccggtgctggaggaagatgaagaattcgtggtgtcggtggcgctgcccaagctgcgtgccatccaccgagtgctcggcctggccggtgggttgaacaaggtccaggccattcgtggcgcactccagggcggctacctggacatcctgatcaccgacctggacaccgcacaggccctcaaccaataaccctttttggagactgccgctcatgacgtccaagctcgaacaactcaagcaattcaccaccgtggtgtgcgacaccggcgacctggaagccatcagccgcctgcgcccggtggatgccaccactaacccgtccctgctgctcaaggcggccgccatcccggaatatgccgagttgctgcgcagcgcggtgggccagtccaagggcgatgtggacctggcctgtgaccgctttgcggtggcggtgggctgcggcattctcaaggtgattccggggcgcatctccaccgaagtcgacgcgcgcctgtccttcgacgcagacgcattatgggccaaggctaaccagttgatcgcgctgtacgaccaggccggcgtcggccgcgaccgcgtgctgatcaagctggcctctacctgggaaggcattcgcaccgccgagcgcctggaaaaggccgggatccagaccaacctgaccctgctgttttcgttcgtccaggccgccgcctgcgccgatgcaggggtgttcctgatttcgccgttcgtaggccgcatctatgactggtaccgcaagaacaccggcctggactacaccggcgccgaagacccaggcgtgcagtccgtgacgcggatctacaactactacaaggccaacgccatcaacaccgtggtcatgggcgccagcttccgcaccctcagccagatcgaacaactggccggctgcgatcgcctgaccatcagccccgagctgctgcaaaagctcgatgaagaccagggcctgctggaacgtcgattgaatccgggggcggttggcgagccgcgccagaccctcaacgaggcgcaattccgctggggctccaatgaggacgcgatggccaccgagaaactggccgaaggcattcgtcagttcgcccgcgaccaggaaaaactcgaggcggtcctcgcagccctatgagccctgccctgtcgctgagccagcctcgcaccctggtgttcctggcctacccccagatgggcctgctcgacctgaccggcgcccagaccgtgttctgggccgccaccaaggccatggccgagcgtggcttgccgggctacgtgatgcacaccgccagcctggccggcggcctgatgcagaccgccgaggggctgagcgtggacacgctggcgctggagcacctggacacgcacgtcatcgacaccctgatcgtgcccggcgcgccggcgatccaacaggcgatggccgccaataccgagctggtgcaatggctgcgcgtggcctccgccagcgccgggcgcaccgcctcggtgtgcagcggcaccttcctgctggccatggccggcttgctcgacggccgccgcgccgccacccactgggccatgtgcgacatgctcaagcagggtttcccggacattatcgtggacatggacgcgatctttatccaacagggcaatgtgtggacgtcggcgggtgtgaccgccggtatcgacctcgcgctggcgttggtagaggccgattgcggacggcccgtcgccctgcaagtggcgcgggaactggtggtgtttctcaagcgccccggaggccaggcgcaattcagccaactgctgcaagcgcaaaccgacgacaccgccggtttcgatgccttgcacctgtgggtcgccgacaacctcagcgacagcgacctcaccgtggagcgcctggctgaacaaagccgcatgagcccgcgcaactttgcccgggtctacaagcagaaaaccgggcgcacgccggccaaggccatcgagctgtttcgcctggaagcggcgcggcgcctgctggaagactcccagcgcaacatcgaccaggtcgcgcaactgtgcggcttcggcgacgaagaacgcatgcgctataccttccagcgtcacctttcgatctctccccgcaactatcgcgagcgcttttcacgctgagcgcctgcggcctggcagtaattcagggttatgtgtcctaccagacaagcagcgctgcttttacagtgagccggcaacgcctcaccgcttgagcaaacgaattgacctggtccctggaacatcccatgaaacagcacatccttattatcggcgccgggttcggtggcgtctggagcgcgttgagcgctgcgcgcctgctggacaaacatgatcgccacgacgtgcagatcagcctcctcgccccacagccggaactgcgcatccgcccacgtttctacgagcccgctgtacacaccatgcaggcgccactgggtccgttgttcgaagccgtgaacgtcaagttcattcaaggcgcggctgacagcatcgatgaaaacgccaaacacgtgacctaccgggatacggccggcatctccaccacgatcccgtacgaccgcctggtgctcgccgccggcagccgtctgaaccgtccgcagatgccaggcatcgagcatgtcttcgatgtggaccagatcgaggatgccacgcgcctggaagctcatatcaccgcgttgaaaaacctgcctgatagtcccgcgcgcaacacggtgctggtcgctggcggtggtttcaccggcatcgagacctccaccgaaatgccggcgcgtctgagggcagccttgggtgacgatgccgatatccgcgtcatcgtcgtcgaccgtggcccgcagattgccgcctccatgggcgatggcatccgcccatcgatcatcgaagccagcaacgcactgggcctggaatggatattgaacacgtcggtggcttcagtggatgccagcggcgtgaccctggcggatggacaacgcattgaatcgaaaaccgtgatctggaccatcggcttccgggccaacccgctcaccgagcaggtcagcggtgcccgcgatccccagggccgcctgcatgtagacggcaccctcaaggtcaagggccaggccgacgtgttcgccgccggtgacgtggcttacgccgccaccgacgacctgggcaactttgccggcatgtcctgccagcacgccatcgccctgggccgctatgccggcaataacgtcgccgccgacctgatcggcgtggcgccgatgacctaccgacaacccaaatacgtgacctgcctcgacctcggcgcctggggtgccgtgtacaccgaaggttgggatcgccaactgaagctggttggtcaggaagccaaggacctcaagcatcagatcaataccgtgtggatctacccaccggccgccgagcgtgctggcgcgctggcggcggccgacccgttgattccggtggcctgaagcccgtactcccgggcgcccgccgctgttgttcaggcgggcatttttttgcggcattcatccattgatcgagccgccaccgcgcccatcaccccgcccaccatcggcgccagccagaacagccaaagctgtgccaggtaatccaccccggcaaacaacgccggcccggtgctgcgcgccgggttgaccgaggtattggtcacagggatcaggaccaggtgaatcaaggtcagtgccaagccaatggcaatcggggcaaagccaggcaccgcgccgggtgcggtgacgcgcataatgatgaagacgaagaaaaacgtggcgatcagttcagccagcaacgcggacttcatgtcgaaatgaccggggctgagcggaccatagccgttggcggcaaaaccgcccaccgcgaaatccggctgcccgttggcaatcaggaacaatgtggcagcggccgtaatcgcccccgcgacctgcgccacgatgtacggcagcacatcagcgccctcgatacggcgccccacccacaggccgagggtcaccgccgggttgaaatgcccgccggaaataccgcccagcgcataggccatggtcaacaccgtaagcccaaacgccagggaaacgcccacaaaaccaatgcccaacccggggaaagcagccgccaggatggcgctgccacagccgccgaaggtcagccagaaagtaccgatgaactctgcagtcaaacgtctttgcacaatcaactccattgcagctcaagtgccgtcgccacgggaggtgggcggtccggggcgacggtagcaatgggtatcaatatgtcctgtaagacttgtctggttttaacggcttacaacgccctgcccaaatttcctgatcgccaggcagtaaccgatcaacgctaccgccgccagcaacccaccggccgcgccgatccaggcgaagccgaactggctgccgacccaactgcccatcagcgcaccgccgccaatgccgatgttgtagatgccggagaacatcgccatggccacgtcggtggcgtcgggtgccagcaccaacaccttggattgcatggccaggccaaagcccatgatcgccatgccccagaaaacgctcagcaccaccaggtaggactcggcaccgctcaagggcagcagcaacgtcaggcagacggccaggataaacaccgcgcccaccacgaacaggtgcgggttgaaacggtgcaccaggctgaacagcagcgagccgatgatgcccgcgccgccgaacaccagcaggatcagggtcaccgcgctgccgctcatgccggccacgcgttcgacgaacggttcgatgtagctgtaggcggtgaattgcgcagtgacggtcatggcggtcagcacatacagcgccaccagcgccgggcgcttgaacagcagcggcaggctgcgcaacgagccggagttctggctcggcaacagcggcaaggtgcgcgccagccagaacaccagcgcagcggcgaacgcgccgatcaccaggaacgtggtgcgccaacccatggcctcgcccagcaagcggcccaacggaatacccagcaccatcgccagggaagtgccagtagccagcaggccgagggcttgcacctgcttgccttccggcgccaggcgtaccgcgagtgaggcggtgatcgaccagaacagcgcatgggacagggcgatgccgatacgactgagcatcaggatgccgaaactggtggcgacactggaaaggatatgactggcgataaacaggccgaacagcacgatcagcagcttgcgccgctccacgttgcgggtcagcagcatcaccggcaatgaagtcagggacacgatccaggcatagatagtgagcatcagcccgacgctggacaccggcatgtcgaaactggcgccgatggcactgagcagcccgacgggcacgaattcggtggtattgaacacaaacgcggccaacgcgagagcgaagaccggttgccaattggcttggggcgttgcggctgaaatgctcatggaacggcgcggtactctggcagtgatcaagcgggggcggtgatcgagcggccacccaggacaagcgccgccgccgagcattctataggtttccggcccgactgttggcgctcatcccgctcaaaatgacctcaaccgggtcagggtgccgtcatggtgaccacgtaggcgcccgattgaaccggcttgccgagggcatccaccagcacataccgctggtcgaaatagcgcccgttggggctgtcggccaccaacttgacgttgaccgccgaattgcccagcgcggtcacactgcgcaccgactgtgcctcgaactggctgccacgcagggcttgcgggcatccattgaactccactgtcgccccgcccgacgtactggggttacaaccgggctcgacgatgctgccgtgaaattgaatgacaccggaagatgccgccaggcatgcccccgtccataccgcaagaacaccggtaaccagtgacaaacgtaaaacgttcatgtcgacgctccttcttgggctgttaagaagtaagtcgtctggcccggcgtttacttgaggttattcgtcggtgtctgaaagaaaagttacgggtccacctgccccatcaattccggaatcgactccggccgattcgcataacgctgggccaacgccgcgcagaccatcaactggatctggtggaacagcatcagcggcaggatcagcacgcccatgctcgccccggcgaacagcacctgggccatcggcacaccggtggccaggctctttttcgaaccgcagaacaggatagtgatgcggtcttcctggttgaaaccgaacgccttgccgagcaccgtggacgccaccaacaccaggcccagcaacacgcagcacgccactaccaggccacccagttcccatagcgggatctggtgccagataccttcattcaccgcttcgctgaatgcgccatagaccaccagcaggatcgagccctgatcgacgaatttcagccaggacttgttgcgcccgacccactcaccaatccagcggcgggcgatctgcccggcgataaacggcagcagcaattgcacgctgattttcaggatggcgtcgaccgtcgagccgccgtcgccgtgcacattgagcagcagcgtcaccagcaacggtgtcaggaagatgccgaacaggctggacgccgccgcgctgcagatcgccgccgggatattgccccgcgccagggacgtgaacgcaatcgccgattgcaccgtggccggcaaggcgcacaggtagagcatgcccatgtacaggtctttgccgatcagcggcgacagcaccggcttgagcgccaggcccagcagcgggaacagcacgaaggtcaggctgaacaccagcagatgcaggcgccagtgcccggcgccggccacgatggcctggcgcgacagcttggcgccgtgcaggaaaaacagcagcgcgatggccaggttggtcacccagccgaaggccacggcggtctggccgctggcgggcagcagggaagcgagaatcaccgtggcgatcagggtcagggtgaagttatcgggcaggaaacgggggcgagtcataagcaggatcttccgggggttgccaagagcgtcatcgcgactctaacgtaacggcttgttaccgactaacgccaacgagccaacaaatgccgcctaaaggacatgccaacaccgtgcgccgtagcgtgccagggctttccagcctgccacggccggtgtatgggcgcaccgaatcgctgcccaaccgtgcgctgacccgccggcacagccacccatgggtgcaattgtcctacgcaatttccggggtgctggagatccagaccagcgttggccgtttcgtcgcgcccccccagcgcgcggtgtggattccagccggtgtaccgcatcgggtgttcagttcgccccacacagagatgcgcagcctgtacctggattgcagcgtcaccacctgggcggccgagcgctgtcatgtgctggcggtgagcagcctgctgcgcgagttgatccgcagtttcagcgaactgccggtagaatatgccgaggatgggccggacgggcgcctggcccaggtggtgctggaccagctggcggcggcgccgcacgtcgacctgatgctgccactgccgctggacacacgcctgcggccgatctatcgcagcctgagtgcgcacccggaacagcaaacgaccttgggccagtggagccagaaactgggggtgagcgagaagaccctcagtcggttgttcttgagcgacaccgggctgacgttccgcgcctggcgccagcgcctgcgcttattgagcgccctgcccgccctggagcaaggcgagcgggtcacggatgtggcgctggggtgtggctatgagtcgacgtcggcgtttatcaatgcgtttcggcagcaattcgaggccacgcccggcgaatttttccgctgacatcagctgccattgccgccatgggcctcttcgaagaagtagtccttccaactggcggccttgtttttcagcacgcccaatgcctgcaatttctcggcgtagatgtaggtacgctgcggcacgatggtgaagtcgatttccgggtcctggacgattttttccaccaggtccaacggcaacttcgactgttctacgcggatataggccttggctgccgctggtttatcggccttgatgatcgtctcggcttcggccagcgcggcatagaacgctttgtaggtcttggggttttcgtcgtggaatttctgcgtggtgtagagcacgttgaacgtggccggcccaccgaggatgtcgtaggaactgagcaccttgtgcacattcggattcaacagttcctggtactggaacggcgggctggagaagtgcgcgttgatctccgatcccccggcaatcagcgcggcggtcgcatcgggatgggccaggctgatggagatgtcgtcgaacttcttgaagctggcgtcgccgaactgcttggcggtctcgatctgcaaggtgcgtgactggaaacccacgccggcggcgggcacggcgatgcgatctttttcgctgaagtccttgagggtcttcacgttggggttgttggtcagcaggtagttgggcatcgagcccagggaggcgatggccttgacgttctgcttgcccttggtgcggtcccacagggtcagcattggcggtacaccggcagagactacgtcgagcgcaccggccagcagcgattcgttcatggcggtggcgccggaaatgctgttccactccacctggatatccaggccttgttccttgccgtgtttttcgatcagatgctggtcacgcaccacgtcgaggatcaggtagccgatgccgaattgctgggcgatgctgatcttgccttcggcctgggcgccgatactgatcagggccgtcgcagccgccaacagggtcagggaggaacgcttgaaagtcatgggagtctgccgcgtttttaagaaggtgatggagcctagcgacgtttttttagactggaaaagaatatctggatctattgttatgcaaatggcccacaaaccagcgcccggctgctattgtgccgcgctttgaaaaactgccgaaccagcgaggaaatggacgttgaacactgacgaaaaaatgaccggggacctgttcgaggtggataagcgcctgtcactcaaacccgtggtggacttcaacgcctacctgcgcagcgcgttcggcgacggcccgtgcagctgcatccgctgcaccagcggtaacggtgatgaaagcggctatgagttccagcacagcttcaccttcgacggcaaacccacccagcgccgcttcgccaccacggcgggcagcgatgtgttgcaagtgttgaagaaggcctggttgtcgtacaccaaggccgagctgccgttgagcggtgtgctggcgctggatacggtgaaggagtttgtcgagccgcagttgcacaagcggttgataccgctgtttttggccagtgggttggtcaaggacgtagacggagcgttgcaggttcagccgcaggcagcgtaagccacattttgtggagcaggcagatggttgtggcgagcgggcttgccccgcgctgggcaagcccgctcaccacaattacactgaagtgatcacttacgcgccgcctcccactgcttcagcaggtcaccgtaagccacggtctcacccttcggcttctcgttggccagtttcggtttcggcgcgcccggctggtcgaaccagtattgcgcgtcacgctcggggttcattttcgggccgcacaccggttgcaccttggagcgttccaggcgcgtcatgatcgcgtcctgctccttggccaggttgtccagcgcttgctgcggggtttgctcgccgctggcagccctggcgatgttgctccaccacaactgcgccaggcgtggatagtccggcacgttggtgccggtcggggtccactcgacacgggccgggctgcgatagaactccaccaggccaccgagtttcggcgccatgtcggtcatagcctgggagttgatgtcggactcacggatcggtgtcaggccaacgatggttttcttcagcgagacggttttcgaggtcacgaactgcgcgtagagccaggccgcaagtttctgtttctcaggtgtcgacttgaggaaggtccaggagcctacgtcctgatagcccttcttcatgcccttttcccagtaaggtcccacaggcgacggcgccatgcgccatttcggcgtgccgtcggcattcaccaccggcaggcccggcttggtcatgtcggcggtaaacgcggtgtaccagaagatctgctgggcgatgttgccctgggacggcaccgggccggattcggagaaggtcatgcccgcggcttccggtggcgcgtaggctttcatccaatccacgtatttctgtgtggcaaacactgcggccgggccgttggtgtcgccgccacgggtgacgctggagcccaccgggtggcagtcctccacacgaatgccccactcgtccaccggcaagccgttgggcaagcccttgtcgccgccaccggccatggagaaccaggcatcggtgaagcgccagcccagggacgggtctttcttgccgtagtccatgtgcccgtagacacgtttgccgtcgatttccttgacgtcttcgctgaagaacttggcaatgtcttcataggccgaccagttcaccggcacgccgaggtcatagccgtatttttccttgaacttggctttcagctccggacgctcgaaccagtcggcgcgaaaccaatagaggttggcgaactgctggtcgggcaactggtagatcttgccgtccggcgcggtggtgaaggagataccgataaagtccttgatatccagggtcggcgaggtgaagtccttgccttcgttggccatcaggtcggtgatggattcagtcttgccgtagcgaaagtgcgtaccgatcaggtccgagtcgttgacccagccgtcgtagatgtttttgtcggactgcatctgggtttgcagcttctccaccacgtcgccttcctgcaacaggtcgtgggtcagcttgatcccggtgatttccgtgaaggccttggccagcaccttggactcgtactcgtgggtggtgagggtttccgacaccacgttgatcttcatcccacggaacggttcggcggccttgataaaccacttcaattcctccagttgctgatcggccgtgagggtggacggtttgaactcgctgccgatccattttttcgcagcatcttcgtacgcatcggcccaggccgaagcgctcaaaccgctcatagccagtacggcggccaatgaaatgctatgtcgcagcttattgttcttattcaacatagagacctcctggttgtttattcataagggcactagccccaacgcatcacactcaacagccataccagggagagcgcggacgctacccagatgctccagtcggtaacgccgatcaccagcaaatgcaggtaggcgctgccgagaagaccgataaacaaacgatcaccacgggtggtgctgatcggcaaaaagccccgccgggggatgctcggcgagcgcagttcccaagtggtcatgcccgcaaggatcagggctatgccgccaaagaacagcgcggtgggggtggtccaggccatccattccatcatcgactcctcagacccggcccagggcaaagcccttggccacgtggttgcgaacaaaccagatcaccagcatgccgggaaggatagtcaacacccccgccgccgccagcacgccccaatcgatacccgacgccgacaccgtgcgcgtcatgactgccgcaatcggcttggcgttgaccgaggtcagggtgcgcgccagcagcagttcgacccaggaaaacatgaagcagaaaaacgccgtcacgccgatgccggagccaatcaacgggataaaaatcttcacgaaaaacttcggaaacgagtagccgtcgatgtaggcggtttcgtcgatttccttgggcacgccggacatgaacccctccaggatccacaccgccaacggcacgttgaacaggcagtgggccagggctactgcgatgtgcgtgtcgaacagccctatcgacgagtacagctggaagaacggcagcaaaaacaccgccggtggcgccatgcggttggtcagcagccagaagaacaggtgcttgtcgcccaggaaccgataacgcgaaaacgcataggccgccggcagcgccacactcagggaaatcaccgtgttcaggctcacgtagtacagcgagttgaggtaaccggtgtaccagctcgggtcagtgaagatcaccttgtagttggccagggtgaagtcctgcggaaacagcgtcagcccgccgaggatttcggtgttgctcttgaaggacatgttcagcagccagtagatcggcaccagcaggaacaggatgtagaccagcagcgggatcactttcttcataaacgtaagacgtttgctcatgttggcggcctcagcggttggcgtcggagtgggtcatggcggtgtagaacagccaggacaccaacaggatgatcaggaagtacaccagggaaaacgctgcggccgggcccaggtcgaattggcctacggccatctgggtcagcgtctgactcaagaaggtagtggcgttacccggtccaccgcccgtaagcacgaacggctcggtgtagatcatgaaactgtccatgaaccgcaacatcaccgcgatcagcagcacgcttttcatcttcggcaactggatatgtcggaacaccgcccagggcgatgcacgatcgatccgcgcggcctggtagtacacgtccggaatcgcccgcaaccccgaatagcagagcagcgccaccagtgaggtccagtgccagacgtccatgaccaacaccgtgacccaggcgtccatggtgttggcggcgtagttgtaactgatgcccagggcgttgaggctgtaacccagcaggccgatatcggcgcgaccgaagatctgccagatggtgcccactacgttccacgggatcagcagcggaatggccaggatgatcagcaccagcgacgaccagcggcccttggtcggcatggtcagggcgatggcgatgcccagcgggatttcgatcagcagcacacaggccgagtagatgaactgacgcagcagcgagtcatgcaggcgcgggtcgagcagcacctgcttgtaccagtcggcaccgacgaagtagcggctggactggtcgaagatgtcctgcaccgagtaattgaccacggtcatcatcgggatcaccgcactgaacgccaccagcaggaacaccggcaacaccagccaccaggccttgttgttctgcaccttgttcatggctgcacctccagcaggtagtcgtcggcatacaccatcagccattgcgccggaaagctgatggacgccttgccctcaggcaccggcttgtcttcggccaggcgcacttttagcagcgcgccatcgaggttgagagtgatgatcttgtaggtgccgaggtcttcgaggtgagtgacatcggcctgcagggcgtcagggttgtactcgtcccagacatggatgaattccgggcggataccgacctgcaatttcttgtagtcggtcgtggcaatgcgttgctgcacggcctcggacaagggcagatgggtgccagcaaagcgcaccccgcccgcctcagcctgcacctcgatcagattcatcccagggctgccgatgaaatagccgacaaaggtatggctgggccgttcgaacaggtcacgcggcgtaccgaactgcacgatctggccgccgtacatcactgcgatcttgtcggcaaaggtcgaggcctccagttgatcgtgggtcacatagaccatggtgatgttgaattgctcatggatctgcttgagcttgcgccgcagtttccacttgaggtgcgggtcaatcaccgtcagcggttcatcgaacaggatcgccgacacgtcgtcgcgcaccaggccccggcccatggagactttctgtttttcgtcggcggtgaggttgcgcgcctttttggtcagcaggttttgcaggtcgaggacttcggcaatttcctgcaccttgctgtgaattttcgcctcggccatgccctggttacgcagtgggaatgccaggttatcgaacaccgtcatggtgtcgtacaccaccgggaactgaaacacctgggcgatattgcgtttttccggggtgaggtcgttgaccacttgggtgtcgaacagcacctggccttcggaggggctgagcaggccggagatgatattgagcaaggtcgacttgccgcagcccgacggcccgagcaaggcgtaggccccgccctgctcccacacgtgattcattgcccggatggcgtagtcctcaggccctttcggcgcagggctgtagctgtgcgccaggttctgcaaatggatctcggccatcaggcaaccctcgcgacacggcgcccgggggcctggaccaaccggccctggccatcgaacacaaacagtttatgggtggggatatacacgcggatcggcgcgtcgacgtcgtattcgtgcacccccggcaggtgcagcaccagcaggaagtgctcgctgcgcacatgcaggaaggtttccgaaccgctgatctccgcgacttccacggtgaccgccagttccaggtcgtcatcgttgctcggcaccaggctgatatggctggggcgtacgccgaaccggaactcgccttcgccgatgggacgcaggtcgacgttcagcgggaagtgcacgaaattggcgaagctcacctcgttgccactgatacgccccggcatcaggttgatcggcggctcggaaaacagctcagcggccaagacggtctgcggctggtgatacacctcggccgccttgccgctctggatcacccggccttcgtgcaggatggtggtggtgccgccgagggccagggcttcgttgggctcggtggtggcgtagatggcgatggtgtggcgcgctgcgaacagttcgcgcatttcctgacgcagctcttcgcgcagtttgtagtccaggtttaccagcggctcatcaaacagaatcagctcggcatccttgaccagcgcgcgcgccatggccgtgcgctgctgctggccaccggagagttccagcgggtgacgctggaggaatttctcaatgcgcagcatttttgcggtttccagcactttgctctggatcagttcgttggacacaccggcctcgcgcaagggcgaggcgatgttttcgaacacggtcatggtcgggtagttgatgaactgctgatacaccatcgacacgttgcgcaggcgcaccggtttttgcgtgacgtccacgccgttcatcaggatgcggccgctgtcgggcttgtccaggccggccatcaggcgcatcaggctggtcttgccggacagcgtacgaccgagcaagacgttgaaggaaccggcttcgaaacgcaggttggcgtcgtcaatccaggtctggccttcgacaacgcgggagacatgttccagggtcaatgacatgacacgacctttttattattggaatgaatctggccagatgacagagcgagtttcatgccaaaacggcaagttattgatgtgcaaggaaatggcgtaaatgggatgttcgggagtgaacaatctgactgaacaactgaacaatccgggggttgacaatgaacagttctgaacaacactctcatgaccaacacagggcaaatgtgggagggggcttgcccccgatagcggtcagtcagatacagattcatcgactgaaccaccgctatcgggggcaggccccctcccacattgacccggttccaatcgttaaatagtgcaagaccccataacaataaaaacgaaggtcaccccatggccgaaccactggctcacgacacccttatccaggaatcctggcgccgttgccgcgcctttggcctggaccaccagagcacgcccagcttcgatcaactgcctgccgagggcatcagccaattgctggagagccagcattcgctggtgcagaccacccaccaggaagtgctgccctactacgagaacatcctgagcaattccaactgcctgatcatgctggccgacaaccaaggccaggtgctgaccagttggggcacccagcgctttatcgagccgaagctggcccgtggtttcaacccgggagccagctggatggagcgcgccagcggcaccaatgccatcggcactgcgttggcctgcgcccaggcggtgcatatcgaacacgatgaacacttcctgaaggccaaccgtttcatgacgggctcggcggcaccgatcttcgatgcccagcgcgagatcatcgcggtgctggatgtgtccagcgacagttacctgccgccctcccacaccctgggcatggtcaagatgatgagccagaccgtggagaaccggctgatcctcaacctgtttcgcggcgaacacttccaactgaccttcaataccgggctgagcaacctcgacagccagtgggccggcctgttgatctttgatgagagcggccaggtgctctcggccaatcggcgtgccgacaacctgctgggcatcagcctgtcgcgggtgatgatcgacagcctgttcaaggtgtcgttgctggaactgttgaaccagccggaaggcctgcccttctccctgcaagcggcgggacgcaaccgcttccaatgcttgttgaagcggcccaagcagacgccggtgcaagcgcgcgtgttcaccgcgccggcgccatcgaagcctgcgccgattggcctcaagaccttgcacttcggcgacgcgcgcgtggagaaagccgtgcgccaggccgagcgcctgctggagaaggacatcccgctgctgatccatggtgaaaccggcgtgggcaaggaggtgttcgtcaaagccctgcaccaagccagctcgcgcagccataaggcgtttatcgcggtgaactgcgcggcgattcccgccgagctggtggaatctgagctgttcggctacgaaaaaggtgcattcaccggcgccaaccagaagggcagcatcggcctgatccgcaaggccgacaagggcacgctgtttctcgacgagatcggtgatatgccgctgcccacccaggcccgcttgctgcgggtgttgcaggagcgttgcgtgcaaccggtgggcagcagcgaattgttcccggtggatctgcgcatcatctcggccaccaaccgtgcactgcgggagttggtgcaggccgggcgtttccgtgaggatctgtactaccgcatcggcggcctgaccctggagctgccgccgttacgcgagcgcaccgataaacaggcgctgttccagcaactgtggcagcagcaccgcgagccgactcaatgggcgggcctgagcgccgaagtgctggcgctgttcgagcagcacccgtggccggggaatttgcgccaggtgagcagtgtgttgcaggtggcgctggccatggccgaggaacagccgatccgtgccgagcatctgccggatgatttcttcgtggatctgaaagttaccgcgccactgcccaccagtgagtacctggatgacagcatcgacctgaaccagcgcttgaaggccgccggcggcaacatctcccacctggcgcgggagctgggggtgagccgcaatactctctacaaacgcctgcgccagaacgaaaactagcgcggcttgaccaccaccagcagatcggtgaagtactccacctgaatcggcaggttatcggccagcgacgacaacgccgccgccgtgtcgtccagcttgaacaccccggatacccgcaggttttgcagggcctgggggtcgaagcgcagcatgccgtggcgatagctggcgagggtttgcaggacttcgctcaggggttggtcgttgaccttgagcaggccccgggtccaggcgtcggggtcgctgtcgccaatggcttgcggcggctgggcacgaccgtggtcgagcaccgagcgctggccggctgtgaccttgactccttcgttgctttcacctttgaccgctaccgtggattcgatcaccgtgaccagcgtggtgccgtctgccgcgcgcttgaccagataacgcgtgcccagcgcagtggccgtgccctggtcggtacggaccacaaaggggcgttgcgcatccttcgccacctcgacccagagctcgccttgcagcagttcgatcacccgttgatggccgtcgaacttcacatccactgccgagttgctgttgagctgcaactggctaccgtcttcgagggcgatctgtcgccgctcaccgacaccggtacgctggtcggccatccacaccggcaggtgttgcaggcccagccagccgcaccaaaccaggccgagcacgcccatcacctgcgcgccacgcgggcgtcgcggggtgaaggcgcggttcagggccatgcgcgcgggcttggcgggcaaggcatcgaggctgccccataacgcactcatgcgctcgatggccacggcgtggcgcgggtcggcctggcgccaggcgttgaacgcctggcggtcggcgtcggtcacgccttcgtcgtgcaggcgagtcagccactgcgctgcttgctggatgatctgctcggaactcatgccagcgggtctgccgggtgcaggctgtggtagcaatgcaccagggcgctggaaatgtagtttttgacggtgctggaggaaacgtccaggcgcagggcgatttcgctgtaggtcagcccgtcgaggcggctcaacagaaacgcttcgcgggccttggcaggcaggccggcgagcatctcggcgatgcgttccagggcttgcagcgccacatgaatcgcggccgggtcgggcatgccggcgtcttcacactggatcaccagggcttccatgtaggctttttcgatacggcgacgacgggcgccgtcgatcaacaaccggcctgccgtggtggccaggaacgcgcgaggttccttgatactttgcggctcggccagcatcagcacgcgaatgaaagcgtcatgggccaggtcggcggcatgctgggaacacccgagtttcttgcgcagccagccgtgcaaccagccgtggtgctcgctgtacatcgccgtgagggtctgctggcgaacggagtcgcccagcgcggccggaatgtcatgcatgcgcaaaaatatctcaaatgggaagagttaccaattgcgcgaacaatgccagtaaaacctgcttggggcaagggcctgtctttaacgccaactccaggacacgccggtatagatgccacgaccatccgccggcgtagagcgcgctacatccaaccccttgtcgtcataacccggcgtcacggtattggcgtaacgacggttggccaggttgcgcaggtcgacccaggcttgccagtcctgcttgggcgcgtcgtagccgaacgtggcgccgagaacggtgtaggacgcggcatagtaggaattggcgtagtccaccgccacccgcgaggaatactcggtgttgaggctggtgtagaaacccgtcggatggctgtagcgcacttgtgcctggtagtagtgcttggggatgcccggcaaggtgttgtcgccgaagcggtcatcgtcacggtagtgaaagtcactgaaggtgtaggcctggcgcagggcaagctggccgttgcggccgccgtcccacagtgggctgagcaggctcagttccacaccctggtgcaccgtggggctggcgttggactcggcgacgatggcattgctggtggaggtttgcgcctgggtttcaacggtgagcagttcgtggcgcacttcggagcggtacagggccaggtcccattggccgagccaggcctcaccgcgcccgccgatctccagagtggtggcggtctggtttttcaggctcacgccctcccgtgccaggcctttggctggaccaccggtaaagtatttgttggaaccccagatcatcgaccacgcatgcggcggctcgaccgagcggctcaggttgccgtacacctgcaattgcggggtgaagtcatagcgcaggccgatgcgtggtgcgtagtcccagtcgtgctggctgagcggcgcctggccttcaggataggtgacctgggtttcgcgacgcgtgtagatcgccgccaggccggtggtcagccacaggtcaggcaccagctccaggtcgttgccgatatgcagcacggtgtcggaacccaggtagctgtagtcgcgggtcttggtgccgggggcgtaggttgctgtattgccagcgggcgtgcgcacgtattccgaagcgccgttgttgggcatcgcctgggtggtgcgcaggccgacagtggttttactgtcatggccaaacagcgtgtcctggcggatgtaattgagggtgctgctgatatcggtgtaggcgactttcaggcggttggtgccttcgcgcaggtccatcgggtagtcgtggtaggccagcccgacttcgacccgggcgttgtcgtccaaatgcaaggtggtcttgttggcgatccaggtggagcccggttgcaggcgcttggaatcacgggctgcgttgaggctgttggccgcacgcgggtcgtggctgatctggctgcgcgtgagcttgcctggggtgtcgttggtggtttcgcggtaacggaagtaaaagcgggtttccaggtccgggttgaagcggtagccgaagttggcggccacgcccttgccggtggcggcgctctggcgctggtagccgtcggattcggaatcagtgaggctgatgtagtagtcggcatcccccagcacctggcctgaactgatctcgcgctgggcataacctttgctgcccgcttcgtaacgcagttgcagcttgggcgcgtcgtagcccgtgcgggtcacgtagttgaccgcgccgcccaaggccagcgcgccctgatcaaaaccgttggcgccgcgcagcacttcgacttggctttgccacagcgggtctttcagctcatagggcgtgccgccggggccggtgagtggcaggccatcgaacatttcatataagccggaagcatgggaaccgggactacggttcaggcccgagccgcgaatcgagagtttcaccccttcgttgttggccgccttggcatacaccccggcctggtacttgaacacgtcttcgttggtgctcacccttccctgctgcacgctgttcatgtcgatatagttggtgccgccgggcacgctcttgagctgcgcctgggccacttcaccgtcgctggcttggctgctggtgacttcaaccggagccagttgcaggtcttcggcgtgcaccagtgagcttaaggtcagggcggcaaacaggagcggaggttggcgcagcagcatcgggcaggtccttggaattcggggggtacgtggtgggaagacaggggcgcccgccaggtcactccttattaacggaccagacccttcctacaccaacgtcggaccgagactattctctgcaggatggtggcagagcagtaggaagtggcgagcgcgcttgtcccgcgttgggctgcgaagcagccccaaaaacagcagccgaagagtgcctgactcaccgcattcttccttccagggtcgcttcgcaacccaacgcgggacaagcccgctcgccaccgatgcagtgttcgtctttaatgggagggtatcagccagatatggccggtttttcaaagaccttgagagggatggcttttaagcctgggaggtttgcgatttcaacctcccgaaaacgcatagattttttcagcagctcacatacagatcactttggggtcgctgtctgttcgaaattgcgaccaacctccccgcgtcgaatgtatcacttggttttgtatcccaggtaaggcagtcgcctgtacgttgacgctttggcctcctgggctgttttctgtgaaaaatctgaagctgatatgacaagtatggggcttatcgtccgtattggtcgcaaacacgtccaatccggactggtcttggcggaccgcagtcgtaaccgcgctggccatcgttgaaaacactactgcaagtgcgcctatcagtaatttcttcattggaaacgtctccgttcattgatcgaaatactgtgaaagccaaactgcagcacagtaacgtcaactgtagctgaaagagcccctgccattgggcgtggcttgaaaatatggccattagccgctatctatacgccctgcgtttaacccgttctgttacacctcgtgaaccacccgcgagcaacggccgagcatggacaggcgaaaaaccggctttcaaaccgagtagggcaagcgaacgtcaaatgagcgaaaagaaacagcaattcagaaatacgtgcatattttgcaaaggtaataaaacctcaaacgagcacattttcccccgttggttaaggcagttcatacccatcgaacggggaagcgacgataaaagctaccatcgcacactggtcacaaaacaacctattgggggtgcatcaacagaagttttcccaaaaaacaccagcaactcggtattgagtactcagaccaagaaagtttgtacaacttgcaataaccaatggatgagtagattagagacagaaatgatgtccctctatgaaaaactacatcgtcaatcgctcaccaccttatcgatggatgaccaacgagccctcagtacgtgggccattttactggcgataaaatgggacctcactgaagtcaacacttcagggtattcagaacgacacacgcatcatgtgttccagcacaagaccccgccacctaacacgaggatttggctgggctactgtgaagacggtcaagtggaaatcaggcataggacaacggttttgctcaaggccaaaccgacacaggcacatccgattaatgttcgatcaacagcgataatgctcggcaccttggtgttgcacattcttagccatgaaacgtccagttatccaataatagtggatgccaacaaacgcaacaaaaaaatggtcttgatatggcctacaacacaagaacttgtcatggatcgatcaatgctcgaaaaagtcacatccgaaaacctgaaatcaatgtctcacttcctaggtatgcagcacagctaccgacacgttgtatcgcttattgcctcactgccagaactttatgctcaaacataacgtaacctgacctgttgacatccgcccgctaggcctactttccagtttggcccaatgctcgcatcagctcctctgcttccgaccctggcggaaggcggaaaccgaacatttcatcagcggccagaatctcgcccaccgcgtcgagtaattgcgcctcggttggcgagtcacgcagcagcttgtgtgccgccagtaacaattcggcgcaaacgccttggacactcgccgcatcgatcacggcaaaaaggataaaacgcaaacgtatttcgcgatcagtgggccaaaccgttttttgcttacccatggtagaggcctcaagctttcggaaaaatccgaggctattgatggcttgagggtgtttcaagcatcaggaggcaagataggtcacttcctacagaagaaagggaaacaccgtaccaatcatcaaaggaagccaggctttattgcaccggcagaaagttcatcagcaataggctctgcgcgtaattgagaccgatgcgccggtagcgttcgtcaagcatctgggtcagcaagtcgagtcgcgctacgattttgccgaactccaccgcgaagctgaggttgctgccctcctccgatatctcgttggagaacaacagcagcacgccattggcatcctggcgcttgctcagcagccaggtggccttctcgatgttgcgtgcggcgttgctgacgaactgcgggttgatcgaatcggtgatgtagaactcggtgcgcccaccgtgggcggtcacgatcatgctgccgatggcgtagataaatgcgccgacgcggtcgcctttgaactccgcactcagggaataactcagcgccgccaggtcacgccgatcacccagggccggcagcgatcgccgctgctcgatggcctggcggatctcgcgcgcagcggtgaccgcatccggatagcccgactgacgccattggctggggttacgcaggtagagcttgctcatcagcagatacaggctttgcaggttgtcgcgcatgccaagcgtggccatgcggtcgacactggtctggaagaactcatcgggcttgccgttgctgaactgcttggcgatatcccgcccctgttgctggctgcaaccgccagcgcagagcatcaacacggcggccagcagcaagggctggcaacagcgcggaaggttgaaacgaagaaacgtgcgatccatcggcacccgatctgattcatctgcccacacgggaaatcggcagggctgggacaaggatagagcggagaaatctaaaaaagtgcagtggaccccggcagatagttgtaagcagagaccaccgggcaggtgaatcggcgcaatcgtgaaggattcgtttcagggcctatactgaaggcaacagcggcgtgtgttgttggcgcatttgctcataagcagctgtataggaggtgacggcaatgaaacatccaattcgggcgcaaatggttgttcagatgatttgcctgctttcggtggctcagcttttttgctgaaaacgtgtcaccggtgtcaaattcagccgtggttgcggcgctgggaggtattgtctgcaacctcctcagcaactggcccgcccccattggccgggccagaacgtgcaactacaacaagaccgtggccagcatgcctagagcccccaggcaaaacccgatcagggcaccccgcccgggtacttcatggaacagcgcccagatcaccacaggctccagcagcaataacgaggtgatggatacgactgtcaccacccagatatcaccgaccgcacgataccccagccagtaagcccccagcagacacagcccggcaaaacacatgaccaccaccggcatgatgaacgcctgccatgaaccgtcgccggcctgagccagcctggcggtgattacctcgctgtagattgcacaaaactcaccaacgaccatcaaccctagagcagaaactccgagtagttctttggacatatcaaaaactccttcgtattcaacgcactgtttttcaactcccagcgggcgatgccgttgccgaggttttcgttgcagcgatacgaagcagccttgaacaggcctgaattaccgaagtgcttttgcatgctcgtgtccttgaaaagggggtgaatcccagcgaccgtagaggacgcccggcctgatcatacgtttggtcaagcgctttgaacaacctgcgcagggcatccaaaattcacaagacgcctagtcgacactcggcctgttcaggctatgatcgccccctatgaaccagaaggctgactgcccatgcccgttgacctggaagccctctatcccaaactgatccacctgatgctggatacagtcttcgtcgtcgacggcgacaaccagattgtgttcgtgagcgatgcctgtgaggcactgctcggctacagcgccgatgaactggtgggcacacccatcacccactacatgcatcctgacgacctggcacgcacccgagcctccattgtccgggtcatgaacggccaaccccatgtcgacttccgtaatcgttatatccgcaaagatggcagcgtcgtgcacatcctgtgggcggcgttctggtccgaagaagtgggcgcgcgcatcggtgtcgcacgggacgtgaccgcactcacccaggccgaagaggagctgcgcttcctcgcccaccatgacccgctgacagccctcaccaaccgttcgctgttcaatgcccggctggatgacgccttgcataccgcacggcttcacaaccagcccctggcgctgctgttcctggacattaatgatttcaagggcatcaacgatgtgcatggccacgccatgggcgaccgcctgctgtgcgtgattgcacgacgactggagcgctgcgtacgcgaaagcgacctggtggcccggatgggcggggatgaattcaccgtactgatgaccgacatcccctcacaggatgcggtgaccggcaaggtcgcgcacttgctcgcggtaatggccgagccgctggggccggagtttggcggggtgaaaatgccgtcctgcagtatcggcgtggccttctatccacggaacgggctggatgccgacacgctgttgagtcacgcggatggggatatgtaccgggtgaaaaggcagcggtttgcgacggattgagaccgatcaacaccgcgcgcgccgattaaaagccaatgccccgacgtgtcggggcattggcttgtgtagtcatgggataatcaaccagaaacgaacatcttttcagaagtttcaactggcaaaagattcatcccaacgtggaatcattatttggcttggcgaagcacaagctccgtcaaacgagtcttgacccggaagcagaactcacgaatttgaaattgataagccggcatgaccatgtagttcaaatcaggacccaacgagtctttgacttccatgtacttagcggtcttggcagcaatggcctggtattgcgcctcgtatttatcgtacgacgctttgttgtacacccttagaacatccagctctttacggcattgctcagcgcgattctggttcaagtttgtttcagactcttcctgagctgcctcctgggagacatggattggggctacaggacgtgggttcgcaggtgcagcctcataccgtacagtgaaattttctggtggtgtcgaaggtgcggcttcagcgggtgcctcatggacgacggctggagggggagtctctttaggtttttctggagttttcgtagcgcatcccgagagagcaagacctaccactacaacgatgccacacattttattcatcggtttcaccaagaggtatttggggttggctgagtcgttaggttctgggtaaaagtcatcactcaatcaatgatagagcgtacattttctaccagactcaaggcgctcagccgctcttccttgagtgcgcaggtgagcaatagtagtaaaaaatcaaagagatgacgaggaaaagcttggcgggaagtgcacaaacccaatgggataatgactgtgcggctttgcttctctaagttcgacgacgcccacatcactcggatgcctgcacccggtaattgggcatggtcttcgttgtgaatactgccggtgtcggtgaggatctcggcttggagtcattcccatacttcgagagccggggttaggcgaatgccgaagtcggataggccggacagctcaagctgtgacgatggagggtatggcctgtccataagttaccttgagcttgaaatagtggcgcattgccggtattcatggcgacttcaaaaagtaaggacgctgatactcatgtcattcgtcaaagccggctcactcttcgtatgccttttgggcgctgcgtcgctcaacggatgcaccgtgggccctcaagcaacgtggaccaacctgggccccggtgggatagcaaccaaacgcagccaaatcgcctgctacacagacgcaaacatcatcgacgggaagcgagtggaaggcacattatgcgcgtttcctacgtccggattcctgagcgacggcgagccaaccgtaatcgcaagaatgggctatgggcagcaatacactttggaattcagcaagacgcttgcggggtttgaactaccattcggcgacaagaagggagttctgaaatgcgaacctatgaagactgagcctggcaggacaatacctgagagcttttgcactctcacggtcaacggccagaaattggtcagcgctaagatactgtttggtggcatgtgacaaccacccgtgccgcactcacctgcggcacacctaaatctacacagtcttcagtagcccgaagcggcttacgctccccactgctggttataggccgcgacgtgctcaggaaagacatcaccgtatggtggatactcgattcctagaacgctcaactctattgcgtcttccccgcaatcaaacgagtagtccgcaatgcacacaccggcagcccgaatcgcctctccgcccacaatacgcactgtaaaattaaaatgtctctgatcacgctgagcaaaggctctgacttgctcctggataatggaatatccaggagcaggaacaaatacgccgaacgccacccccatgggcggatcgccgagctctaaatcggaccaaccgataggctgcccattactgaaagcttcgaatcgcagcatggaaatgacctatcaggcactgctaaatttcccgaagaataacgcatcagcttgatagcgggtattcaggaccgcgggcgtggtcaccactctgcatcatggttgcgagtgcccatgaactggtggcaaggaagtatgctgcggtaccaacatctcccaagctgatgtaaaaaagtactattgcccttgcaagccttcactggattcagaccaacacatgcagatcatccgcactggaacggttttaactggcgaatacgctggttggacaatagaaattcaggatgaccgcgcaggtgaaacgggtggttattacctgttcatggtgcaggacgaatccaatggtttcgattcttggtttgagcgcatagagcagctgcagcaacaaatttcagaactcgacgttcgctggaattagcgtctcactcatgcgctttccttttatccctccccttcaacgtcagccgctatagcggcaagacccaaggtggtatcggaaatcatcgatatcggcgacgccagcctactccagggacacagcgagcaggagatcaccaaacgggtttacagaaggattggcgccactgccaaaccatcaaaataggcaaagtttcggaacgcctatcaaaaaccggcgttacctacccaaaccccagaaacacaaaagccccgctagtgcggggcttttgtttgaatcttggcgggaaaccagggattcgaaccctggagacgctattaacgtccgccggttttcaagaccggtgcattcaaccactctgccaatttcccttgtgcatcacaggattatagtagcctatcccgtctcagcgggcgccataatacccgaatgaaacacactgtcaaactctcgccatagcttgttacagagcgtctgttatgatctttgcgactgaacgtttcaaaactgaaggagtgtcgccatgcgcgaacagaattacgcagtgaatggtaacgcgcaggctgagcagcttgaagtcagccgcgtgttgcgcaacacctatggcctgctcgcccttaccctcgcattcagcggcgtgatggcgttcgtggcccagcagatgcgcgtcggctacccgaatatctttgtggtgctgatcggcttctatggcctgttcttcctcaccaacaaactgcgcgactctgcgtggggcctggtgtcggcatttgccctgaccggcttcatgggctttatcctcggcccgatcctcaaccgttacctcggcatggccggcggcgcggaagtggtcagctcggcgtttgccatgacggcgctggtgtttggtggtctgtcggcctacgtgctgatcacccgcaaggacatgagcttcctgggcggcttcatcaccgctggtttcttcgtgttgctggcggctgtggttgcgagcatgttcttccagatcagcgggctgcaactggcgatcagcgcaggtttcgtgctgttctcctcggtgtgcatcctgttccagaccagcgcgatcatccacggtggtgagcgtaactacatcatggcgaccatcagcctgtatgtgtcgatctacaacctgttcatcagcctgttgcagatcttcggcatcatgagccgcgacgactgattactggctgcaataaaaaacgccccgtatcgaaagatgcggggcatttttgttttcagaaggtcagtactggttgggttccatttccagctcgaccttgaagcgctccagaatatcacgctggatgcgccgggccaggttggcaatgtcgtgccccgaggcaccgccatagttgaccagcaccagcgcctgcagcttgtgcacgccggcatctccttcgcggaagcccttccagccggccttgtcgatcagccagccggctgcgagcttcatctgcccgtcaggttgcgggtaagccaccaggtccggataaagtgcctgcaactcggccgccagcacctgggacaccaacgggttcttgaagaagctgccggcattgccaagttctgccgggtccggcagtttttcgcggcggatgctgcagatggcgcggctgacgtcgctcggcgttgcctcgctgatcccctgcgccgccaggcgctgctggacggggccgtagtcgagtttcaagtgactggcgcggctgagggcgaagcgtacgcgcaggatcagccagcgtccggtctcgtgcttgaacaggctgtcacggtaggcaaagttgcattcctccaggctgaagtcgcgcagttcgccggagtggcgatccagggcggtcaggccggcgaatacatccttgatctcgacaccgtaggcaccgatgttctgcatgggcgcggctccgacggtgccggggatcaggctgaggttttccaggccgcaaaagccctgttccagggtccacagcacaaaggggtgccaggcttctcccgcctcggcctcgaccaccacgtgcaggccatcgtcgtgcagcacgcggatgccttgggtagccatgcgcagcaccagcgccggaatgtcctgggtcagcaacaggttgctaccaccgccgatcaccagcagcggcacattgtgtgcggtggcatatgccagggcctcgcgcacatcgctgtcgctgtgggcctcggcgaacagctgggcacgtacgtcgatgccgaaactgttgaacggcttgagcgatacctgcgcaagcacctgcaaggtcataaccgccccttcaattcgatcaccaataaatcacaggcctgctcgatcaggtccaggacccgttcgaagccttgttcaccctcgtagtacgggtctggcacttcgtccacttcggcatcgtaacggcgcaggaacaggtccagctccgccttgccctgccccggctgcatggccttgaggttgcgcagattgctgtggtccatggccaggatcaggtcatagcgcgcaaagtcggcgcgggacacctgctgggcacgctgggccgacagatcgtagccgcgcgccaacgccgcacgctggctgcgctggtccggcgggttgccgatatgccactcaccggtgccggcggacgccacatcgacctgccccgccagccccgcttcgcgcagtttgtggcgcagcacgccttctgcggtgggcgagcggcagatattgcccaggcagacaaacaggacctccatcaggcccccagcaggcgacggacgcgctcaaggtcttccggggtgtcgacaccggccggtggcgcttccagcgcatcgcccacatggatgcgcacgccgtgccagagcgcccgcagttgctccagggattcggtattttccagccagcacgggccccaactgacgaagtcatgcaggaaacccgcgcggtaggcgtagatgccgatatggcgacggtaaggcacgccttccggcaacacgtccggttgcttggcgaaggcgtcacgtgcccacggtagggtcgaacggctgaacgtcagcgccagaccgttgatatcgctgaccaccttgaccacattcgggttgaacagggtctcgatgtcttcgatcggctcggccagcgtcgccatgcgcgcttcgccatgggcggccaggttggcggccacctggtcgataacaccgggtgggatcaacggttcgtcaccttgcacgttgaccacgatggcgtcgggcgccaggccgagctgtgtggcgacttcggccaggcggtcggtgccggagttgtggtcttcgcgggtcagcaccgcctcagcgccaaagcctttgcaggcctcgatgatgcgcgggtcatcggtggccaccaccacacgctcggcgctgcttttgcaagcctgttcccacaccagctggatcatcggcttgttgccgatcagttgcagcggtttgcccggcaggcgggtcgacgcataacgggagggaatgacaacggtaaaggcggtggtcatttatccaggcgctcatcggtggtcagggtacgggcttcgctttccagcatcaccgggatgccatcacggatcgggtacgccaggccggcgcctttgctgatcagctcggttttgtcggcgctgagcttgagcgggcccttgcagatcgggcaagcgaggatgtcgagcagtttggtgtccatgagtgtttcctgaaaaaagcggtttaaggcaaaagacgggcgggcaacaggcgcatcagctgcgtgtcgaaccaggcgacgaacgccggcgacggcagcgcatccaccgcaaggtaccaccagtcgggctgggcaaaggcgcggcacttcaccgcgtccttttcggtcatgaccagcggcaatgacggcgtaaaattcaggacctcggcactgtagggcgcgtggtcggcaaatgcatggggtatcggctgccagtgtagcgtttcaagggtgttgaagaaacgttgcgggttgccgatgccggcgaccgcatgcacctgctggcccggcgcaaaatgatccaccggccggcgctcgccggtttgcaggttgaccagtgcggtgggctgcaaacgaaaggcaaagccgtcctcgcggtcgctggcggcgccgttgtacagcaacgcatcgacactctgcaggcgctccaccggttcgcgcaacggccccgccggcaggcagcgacggttgcccaggccacgggcggcgtcgatcagcaccagttcaaggtcacgggccaggcggtaatgctgcaggccgtcatcggagaggatcaggtccagggtttcactggccagcagcgcctggaccgcacggctgcgatcggggtcgatcatcagcggtacgccgcagcgctgcacgatcaacaaaggctcgtcacccgccacctcggcgctgtggctggcctcgacacgccacggcaactgcggtggcttggcgccataaccgcgactgaccacgccgacgcgcaagccgctgcgttgacaatgttcgataagccacaggatcaacggcgtcttgccggtaccacccacggtgatattaccgaccaccaccaccggcaccggcgattgatagatctcgccctcacccgccaggaagcgtgcgcgcttgcgctgcaccacccggcgatacaaagactccagcggccgcaacaacgcgagtgccggatggccctcataccaggccttgagcaaacgatcggacatggccatcagggttggctcgccgcctcgacggtgctcatgcgcaagtggctgaaaccgagcttgccggccgcgtccatcgcagtgatcacggcctggtgctgggtcttgccatcagcgctgatggacagcggcaactgcgtgtcgccgccggactctttctgcaaggcctccatcaggctggcgaggtcgtttttctccagcaactggttgttcaccgaaaacaccccgtcggcgctgatggcgatgtccagttgcttgacttgctggtcttcggccggcgaaccgctcacggcttccggcaggtcgacgcgcagttcggtttgccgggtgaaggtggtggtgacgacaaaaaacagcagcaggataaacaccacgtcgatcagcgacgcgaggttgatatcgacattttcccgttgcttgcggcgaaatttcacgctttgcccccaaccaggtccacatcgcggtcgccctgcaccacttccaccaacttgatggcttcctgctccatgcccaccaccagctcatcgatgcgacgttgcaggaaccggtggaagaacaccgaaggaatacccaccatcaggccggcggccgtagtgatcagtgccttggagataccaccggccagcacggccgcattggtggtcatgccggagcccatgaacgaactgaaaatgtcgatcatgcccaacaccgtgccgagcaagccgagcaatggcgccatggcggcgatggtgccgagggcgttgatgtagcgctccagttcatggatgacgcgggcggcggcctcttcgatgcactccttcatgatctcgcgaccatgcttggagttggccaggcctgcggcaaggatctcacccaacggggagttggcgcgcagttccttgagtttttccttgtccagttgcttgttcttgatccagccccagacctgccccagcagatgctcgggggtcacgcggctggcgcgcagggtccacaggcgttcggcgacgatgccgagtgcggcgatagagctcatgatgatcggcaacatcatccagccgccggatttgaccaattcccacacagtgaatgtcccctcgaaaaagtgcgccactttaccatataggtgcgtcagccacagaccccatcggccgaggccttgaccccctagggtaagcgctcgcgccagaacctgcgttgactgcgcgcaacgaccggtggcgcgaatgctcccagttgcacacgcacggccccctgctctgcgctgtcatacacctggctgcccaaccgttgataacgctccatcacctgcggatgcgggtggccgaacgcattgccgcgcccccgcgagatcagcacattgcgcggagagagccgctcgacaaacgcccaggacgaagagctgcgactgccatggtggggcgcctgcagccacgcggtgggcaccgccagggacgaagcgagcatggcctgttcggcgtcgcggtcgatgtcgccggtcagtaacaggcgctcgccattggcctgcacctgcaagacgcaggactttgcattgccactgatggcgccaggccactgccacagttcgaacgttaccccgtcccaggtccatcgttcgccactgacgcagggttgcgtaccgataaacgccggcaacccatcggtttctccgcccaccacacgcttgatcggtatgcccttggcaattgccgccgcaccaccggcatgatccgcgtcggcgtggctgagcagcatgaggtccaatgccccgaccccgagctttcgcaacgacggcagcaccacccgcgcgccgagatcaaaggttccagtgcgcggtccggcgtcgtaaagcaatgcatgatggcgcgtgcgcagaatcagcgactgcccttgcccgacgtccaactgcaccacctccacctgcccgtggggcacctgctctcgcgggggaaacaccgccagtagcaacatcggccagcccagcgtgcgaaagggcacgccgttgggcagcagaagcaacacggcccccaacaggctcaccagccaataccccaaaggtacttgcgccgggatccaggccggcatgtgtccggcgagccacgccagccccttgaacaagccatccagcgcgccgcccgccagccacagaagaccttcgccaatatatggcaatggcagtaatgcagtccccgatagcgccagcggcaacaccaccaggctgatccatggcacagccacgaggttggccagcggtgcgctcaggctgatgggcagtcccagcacccacaacaccggaaacaatccaatggcaatcagccactgaggtcgggtccatgcctgccacaggctccacggccccaaccgcccaccaaacgccagaatcagcactgccaccgccgcaaacgacagccagaaccctggctgcaaactggccaacggttccagcaccaacacaccattgagtgccagcaacaacggccaccataggcccagatgccggaagcgcagccgccacaccaacaccaacccgaccatcacgcaggcccgctgtactggcacgccaaaccctgcgagccagccgtagcccaacgcagcgctgaacgccaggccacacgcccagggcaaccacggccaggttcgcggccagcaaccgtagcgggccaagccggcgatcagcccatagatcaaacccgccagcaaaccgatgtgctggccggagatgaccagcagatgcacggtgcccgtatcctgcaacacttgccaatcggcagtggccagccctgaaccatcccccagcaccagggcaaccaggccggcttcccgaccttgggcgtccaccgccataaggcgctgacgcacgctgtcgcgccaggcattgcgggccggcgccagacgctcgccgtccttgaccgagcccgtggcgccgatgcgttgggccaacagccaggcttcctgatcaaacccgtggaaattcagcaacccggccggacgtttgagggtaaccgccaggcgccaacgttcaccgctgcgcaccggcggcccgccacgccaggacacgcggatgcgtttgggtaagcgggcatttcgcgaccgactatcggccagttcgaagcgcacaccctcgcccgtctgtcgcggcaacccgatcacccgcccctccagccagcgcgtctggccgtccagtgcaggtatcaggcgatcatccaatgcccactgtgcgctgaggcatgcccaactcagccccagcaggaaaaacgccagtgggtaggtacgaaacggcaacaacatcaacgccagcaccggcgtggcaatcagccattccataggcggcaacaccggcaaaaagcgcagggccagcaaccccagcgcaaacgcgcacatccctgtcttcatgaaccatccttttcaagtgatccactcagtcttagccggatgcccagggcggcctatgatgttttgtcacaaagtctgaattttctgtttatagaatgcgggcatacttgcccctcgaactgacctggaccccttatgccccggcgcttattcaaacggtacatgcccgatcccacgagtatcagggaacataagtcattacagtttctcggcacgttgctgcatgacccgaacctctggcacctgaaccggcactcggtcgcacgcgcaatggccgtgggtttgttcgccgcgtttatcccaatcccgcttcagatgctgttggcggcagtcctggcgatcaccgtgcgcggcaatatgcccatcgctatcagcctggtgtggctgaccaacccgattaccatgccggtggtgtttatctgcacctacatgaccggcgcctggctgatgaacgtgccaccgcgcagcctgcccgacgacctcacctggaaatggatcagcggccaactcagcaccttgtggcagccgttcctgctgggttcagtggtgttggggctggtgctgggcgccctcgcctattgcctgaccatgggctactggcgctggtgggtggcccaccagtggaaaaagcgcaaacagcgccgcgcttagcaggcccgcaagcgcaggtgcacgcgcaggccttgcccggtattttccgcccacaggctgccgtcctggcgctgcacggcgttgcgggcgatgctcaggcccagcccgaagccgccatcgccggggcgtgaaccgtcaaggcgggtaaaaggcgcgaagatccgctccaggtccccgtcatcgatcccgccgccctggtcctccagccagacatgccaataatcaccttcgcgacgcccgtccaggctgaccacgccgcccgacggtgagtggcggatagcgttgcgcaagatgttttccagggcctgcgccaacgcattcaggttgcctcgcacccagcattccgcccccaacaggcatggcagccgcgaccccggccagtcgctctcatagcaggcgttttcacgcaacatgtcccacagcgcctgaagctggatagcttcctggggcagcggcgcgcgttcggtgtcgagccaggccagttgcaggctgtcttccaccaggcgctgcatcgcgtcgatttcacggccgagccgctcgcgcagttgcgccaggtcttgctcactgtcacaggccactcgcaggcgactcagcggggtgcgcagttcatgggacatgtcccgcagcaactgttgctgcaacaccacggtgccctgcaaacgctcggacatatggtcgaacgcacgccccagttcgcccagctcatcctggcgactggtggcgtcgtgggacaaacgcgtgttcaactgatcggcacgccaggcattggcctgctcacgcagttgattgaggggcatgatcagcagccgatacaacccaatacacagcaaaagggtaaacaggccgggaatcaccccgttggtcaccacccgccagaacagttgatagcgccccggcatgaagcgttgcggcaactcgatcaccagcgaccccgcatgggggtcgcccggaaacgggatcttcagccacggcaggcctttgacatgccggctcaccggccaatccaggccacgcagaaaggtcaggcgctggctttcgttgtcgctcagcgggatgctgctcaacgattgcaggtcattgccgatcacacctatccaggtgctttcgcgcttgcccatcgcctgcagccaggcgtcgacgccggcattgccgccgcgattccacgcctgttcagcaccgaccgcgtacccactcaaggtgattcgcgccgcatcggacaggtaggcgttcttctgctccatgtagcggccccaggaccagctgagccagatcatcaacaagcaaaaggcgatcagcaggcaggcgagtttccagaataacgagtgcctgcccggcagccttttcaacgggcgttcaaaggccgtcatcgtgaccgctcagcacatagcccttgccccacacggtgcgcacttcgcgctcggtgtagccgatggccttgagcttgcggcggatctggctgatatgcatgtcgaggctgcggtcatggggcgcataaccgcgttgcagcacatgctggtacaagaaaggtttgctgaggacttcttcactgttgcggtgcagggtttccagcagccggtattcgctgcgggtcaggccggcccaatggtccaggtggaaaacatcgcacagctcatcgtcaaagcgcagcgcgcgggcatcgtcgcacaccggtgccggaatcggcaacggacgccggtcgagggccactcgacgcaggatagcttcgatgcgcacgcgcagctcgatcatgctgaacggcttgggcaggtagtcatcggctcccaggcgaaaaccgctgacgcgatcggcttcagcacccagtgcggacatcaggatcaccgggatcgaatggctctggcgcagatgagtgaggatcgacaggccatccatgcccggcaacaggatgtccatcaacaccacgtcaaaggcctgctcgcgcgccatctgcaggccctgctggccattctggcaccaggtcacgtggaaaccacagcggcccaggtgctcatggacataagcgcccagcacggggtcatcttcaatggtcaggatactgggtaggccaattgctgcgggattcattagtatctgcaagtcattctcaatggctgattattcaagattaccccgccacaggcaatcgccaccgggcgccgaatggcgcgaagattgccgtatgtcattaatttgcaagattccacgctgcgcaaatggctacactgcgcaggtggcgcgggccggatgcccgtgtgaatcatcgatatcaatgtggtagcaggagagtggcgtgctgacaagaatggggataaaaggccgcgtactgttgctgaccttattaccgaccagcctgatggcttcgttgctgggcggctatttcacctggatgcagttgtcggaactgcagacccagttgctgcaacgtggcgaaatgatcgccgagcagttggcgccactggtggcgcccgccttgagtgcacgcaacaccgacctgctggagcgcatcgccacccagtccctggagcagccggacgtgcgcactgtgtcgttcctcagcccggaccgtgcgaccctcgcccacgccggcccgaccatgctcaaccaggcccccatcggcaacagctcacacctgttgcaacgcaccggcaatgacgccacgcgctacctgctgccggtgtttggccgccatcgcaacctcgccggcgacctgatcccggatgaagccgaccgcctgctgggctgggtcgaggtggaactgtcccacaatggcatgttgctgcgtggctaccgcagcctgttcgccagcctgctgctgatcgccatcggcctgatctgcaccgcggcactggccctgcgcatcagccgcaccatcaacgcgccaatcggccagatcaagcaagccgtggcccagctcaaggacggcaacctggaaacccgcctgccgcccctgggcagccaggaactggaccagctcgcctctggcatcaaccgcatggccgagaccctgcagaacgcccaggaagaactgcaacacagcatcgaccaggccaccgaagacgtacgccagaacctggaaaccatcgagatccagaacatcgagctggacctggcacgcaaggaggccctggaggccagccgcatcaagtcggagttcctggccaacatgagccatgagatccgcacgccgctcaacggcatcctcggctttacccatttattgcaaaagagcgagctgaccccgcgtcaactcgactacctgggcaccatcgaaaaatccgccgacaacctgctgggcattatcaacgagatcctcgacttctcgaaaatcgaagccggcaaactggtcctcgacagcatcccgttcaacctgcgggacttgctgcaagacaccctgaccatcctcgcccccgccgcccatgccaagcagctcgaattggtcagcctggtctaccgtgacacgccgctggcgctggtgggcgacccgttgcgcctcaagcaaattctcaccaacctgatcagcaacgcgatcaagttcacccgcgaaggcaccatcgtggcccgggcgatgatcgaggacgagcaggaagacagcgtgcaattgcgcatcagcgtgcaggacaccggtatcggcctgtccagccaggacgtacgcgccctgttccaggccttcagccaggctgacaattcactgtcgcgccaacccggcggtacgggcttgggcctggtgatctccaagcgcctgatcgaacagatgggcggcgaaatcggcgtcgacagcacacccggcgaaggctctgagttctggatcagcctgaacctgcccaagacccgcgacgacgtggaggacctgccgtccgcgcctctgctgggccatcgtgtcgccttgctggaaaaccacgaactggcacgccaggcgctgcaacaccaactggaagactgcggcctggaagtcacgccgttcaccagcctggaaagcctgaccaacggcatcaccagtgcccaccagaccgagcaggccattgaccttgcggtgctcggcgtcacggccaacgatatcccgcccgagcgcctcaaccaacacctgtgggacctcgaacacctgggctgcaaagtgctggtgctgtgccccaccaccgaacagatgctgttcaaccagtcggtgcccaaccccaacagtcaattgcaggccaagccggcgtgcacgcgcaaactgcgccgtgccttgtccgacctgatcagcccacgcccgacacgcagcgaacccggcgaaccgttgtccagccgggcgccacgcgtcctgtgcgtggatgacaatccggcgaacctgttgctggtccagaccctgctggaagacatgggcgcccgggtgcatgccgtggaaagcggttatgcagccgtcgacgcagtgaagcaggacaccttcgaccttgtgctgatggatgtgcaaatgcccggcatggatggccgccaaagcaccgaggcgatccgccagtgggaaagcgaacgcagcggcacgccattgccggtagtcgccctcaccgcccacgccatggccaatgaaaaacgcgccttgctgcaaagcggcatggacgactacctgaccaagcccatcagcgaacgccaactggcccaggtggtgctgaaatggaccggcctggccctgcgcaatcagggtccggagcgcacgaccgacaacctcggccctggcgtgaaactgccggtgctcgaccacgaggaagggctgcgcctggcggccggcaaagcggacctggcggcggatatgctcgcgatgttgctggcttccctggaggccgaccgcctggccatcacccaggcccgtgaggccaatgacaacaacgccctgatcgaacgcgtgcatcgcctgcacggcgcaacgcgttactgcggcgtaccgcaactgcgggcatgctgccagcgcgccgaaaccctgctcaagcaggacgacgccaaggccatgcatgcgctggacgaactggacatggcgattgcccggctggccagtgaggcgcgggtcagcgcctgaagctactttgacgccgatcaattgtgggagggggcttgcccccgatagcgtcgcatcagtcgaagcatctgtagctgacacaccctaatcgggggcaagccccctcccacagttgtccagcatttccaacagattaattgcggggagccttttgatgcgcgtgattcttttcagcagccaaacctacgaccgcgacagctttctcggcgaaccattgccgcctggcctggagctgcaattccaacccgcacggctcaacctcgacaccgtggctttggccgaacatcacgaagtggtctgcgcctttatcaacgatgacctcagcgccccggtgctggaacagttggccaagggcggcacacggttgatcgccctgcgctcggcgggctacaaccatgtggacctgcccgtcgccaagcgcctgggcctgaccatcgtgcgcgtgccggcctattcgccccatgcggtggccgaacacgcggtcgcgctgattctcgccctcaaccgtcgcctgcaccgcgcctacaaccgcacccgcgacggcgatttcagcctgcatggcctcaccggtttcgacctggtcggcaagaccgtcggcgtggtcggcaccgggcagatcggcgccaccttcgccaaaatcatggccggcttcggttgccagttgctcgcctacgaccccttccccaacccgcaggtacaggccttgggtgcacgctacgtgagcctgcccgaactgttggcccaggcgcagatcatcagcctgcactgcccgttgacggccgacagcaaacacctggtcaacgcccgttccctggcgcagatgcaaaccggtgcgatgctgatcaacaccggtcgcggtggcctggtcgacaccccagcgctgatcgaggcgctcaaggacggccagctcggctaccttgggctggatgtgtatgaggaagaagcgcagttgtttttcgaggaccgctccgacctgcccttgcaggacgacgtacttgcacgcctgctgaccttccccaacgtgatcattaccgcgcaccaggcgtttctcacccgcgaggccctggccgccatcgccggcaccacgttggccaacattgccgcgtgggccgatggccgggcacagaacctcgtcgaaggatgatcagcggtcacataccaggctcatgatgagccagcacccgtgataggatgccgcgcctatttggaggatccatggccgaacacgatttccgcttcagtttgctgagcccgcaacacaccctgatcgaatgccgcgccctggtgccgggccgttaccaggtcaccggcaacggtggttcgatcaagcatggcgacgtgctgatcgtctccctgcgcggcagtaaaaccctgtcgatgcgcctcactgtcgaaggtgacgcgcgctactccatccgcccggcaggccaatgggtcgccatggcccaggggccgaagttcggcgagttggagattcacacctggaaggtcaactgcgacagctgcgacgccgtgttggacttcgagtttgcagtggaaaccaagctgagcaaagagccactgcaacccgccgccaatgcgcggatcgccgagttgggctgggccagcgagggcgacaagcaccgctgcccgaaatgccagaaggctgcgcaatgagaggcctgttgctgcttgccgccctcggggcgggcctgaccggctgcgccggcgacgcggtcaagctccagcaggatcacagctacgtagtggaatggattggtgagcggccgctgatggactacgcgcacctgaccgtcaccctcggcgccgatggccgcgcctacggcaatggcggctgcaaccattggttcgcgccttacaccgtcgagggcaaaaagctcagcttcggccagatcggcagcacccgcaagctctgcgccgaagccttgatggagcaggaacaccgcttcttccaggccctgcaaggcgtacagcgctgggatatctcgccgatcgagcagacgcgcttctggccggccgagggcaagccgatccgcctgtggctcgaagaaggctgataccgccgatcggtaggttggtgggatccatatgtgggagggggcttgcccccgatggcggtgtaacagtcaactgatggagtgactgacacacagctatcgggggcaagccccctcccacatttgattccgggtagcccctagccgcgcaaggccttgagcttggccagcacgccttgcgccgtctgctcgcccatcaacgtttcgcgcaccttgcccttgtcatcgatgatgtaggtcaccggtagcgcttcactgcgtggaatatcgaaaatctcttccgggttctgcgccagcaccgtgaacttgatgcccagcttgtcgctggcggctttcagctcttcgccctgcacattgtcgaagttgaccccgaacacacccacattctgcgccttcagctgtgcggccagtgcgttgagctcagggatttccgtgcggcacgggccacaccattcggcccagtaattgaccaccagccactgcttgtccaagcgttcggacgctaccttctggccatattggtcaacgccgtaatcgttaccgcagccgctgagcagcagggttgtgatgatcgccaatgcaccgatcagtcgcctagtcatggggtaatccttcgcaaaaatgaacgttggctgcggcctatcgcctcttacggtttaaggacaggtcgctgcgcgggtagaatacccgccaccttacgcaagatgcgacccgcacatgaccgatctgacgctttatcacaacccgcgctgctcgaaatcccgcggtgcgctgcaactgctggaagcccgtggcctcacccccaccgtcgtacactacctggaaaccccgctggatgccgcgcaactcaaggcgctgctcggcaaactgggtatcagcgcgcgccaactgctgcgcagcggtgaagatgaatacaaggcgctcaacctggctgacgccagcctcagcgaagcccagttgatcgccgccattgccgatcacccgaagctgatggaacgcccgatcctggaaaccgccgacaaagccatcatcggccgtccgccggaaaacgtactggagatcctgccgtgacgccgccgtatgtgctggtgctgtattacagccgcaacggctcggtgagcgaaatggcccggcagattgcccgaggcatcgagcaaggcgggatggaggcgcgcttgcgcaccgtgccggcgatctccaccgagtgcgaagcggtggcaccgagcattccggatgaaggcgcgttgtatgccagcctcgacgacctgaaacactgctccggcctggccctgggcagcccgacccgcttcggcaatatggcggcgccgctcaagtacttcatcgacggcaccagcaacctgtggctcaccggcgccctcgtcggcaagcccgcgggtgtgtttacctccaccgccagcctgcacggcggccaggaaaccacgctgatgtcgatgctgctgccgttgctgcaccacggcatgctgatcaccggcctgccctacagcgaacaggccttgctcgatacccagggcggcggcacgccgtatggcgccagccaccacgccgggcctgacggcaagcgcatgctcgaccagcacgagatcgccctgtgtcgcgccttgggcctgcgcctggcgaacaccgccaccttgctggagggcggtcgtggccaggaagcctaaggtcctgccgccccaggcgtggttggagccacgggtcaaggtggctcgcgcactcagcctgctggcgttttttggcctggtcggtttgctctgcgtgtattacctgttcgtcgccgacctgcacggcgcacggccgtgggtgatcctgctgatcgaactggtgccgctgctggtgctgacgcccggcatgctgctgggcagcgcgcgcggccattcgtggatgtgctttgtggtgaacctgtatttcatcaagggcgcgctggcggcgtatgacccgaaccggcagtggttcggggtgctggaaatgctggcgagcctggcggtgttttgtacggcgttgttgtatgtgcgctggcggcatcagttgaaccgacagctggcagcggcctgaagtccctcatcgggggcaagccccctcccacactgttaccgcgccgcctatccaatgtgggagggggcttgcccccgatggcaccaccccggcctcaatggttgacggtgtacgccaacatcatcgacaactggcacatcggccgcccgctctcggcgtgccactgattgaacgcaccctgcaccgtcgccaggtcgcgcaggctggtcggcgccttatcgacgatcttctgcgcgttcaacgccgccaccacgtcatcactcggcacaaaggtgtccttgccgaccatgcgcaaaaagcgcggcgcggacagcccgccaagctggtggccgtgcttgctcaggtacttccacagcccgacgatgtcggtcaccggccaatcggcgatgaacgcgccaaagctgcccttctcctgctggatatcgaggatcatctgcgcgttgcgcggcacgctcttgagcttgcccaggtggcggatgatgctggtgtcctgcatcagccgctccaggtgctcggcccccatcagcactaccttttccggatcgaagccgaaaaacaccttttcgaacgccggccacttggcgtccaccacactgtgcttcaagcccgcacgaaacacgcgcagcgccagggtcgacaggtagcgatcatcactgatcttgcgcaattgcgctggggtcttgggtgcaggcagatgggcttccagctcggccgcagaaccgaagcgattcagacaatattcgtgcagccacttgtaatcgcgcatgccctctcctggcaattgaattgaaaacggcgcccgcgagcgccgtgtgtcagagccttgaagggactcagaggttcacaacattgacgaagcgcgacgcggcggtttcatcaattttcaggctggtgaagtcaaacaggttgcggtcggccaattgcgaagggatcacgttctgcaggctgcggaagatgctttcggtacggcccggggtcttgcgttcccagtccagcagcatttccttgaccacctggcgttgcagattctcctgggaaccacacaggttgcacgggatgatcgggaattgcttgaagtcggagtaggcctggatgtctttctcgttgcaatacgccagcgggcggatcaccacgttgcgcccgtcatcggcacgcagcttgggcggcatggccttgagcgagccgttgaagaacatattgaggaagaaggtctcgacgatgtcgtcgcgatggtgacccagggccattttggtcgcgccgatttcatcggcgaaggtgtatagcgtgccacggcgcaggcgtgagcacagcgagcaggtggtcttgccttccggaatcagttccttgaccaccgaataggtgtctttctcaacaatgtggtactcgatgcccagctccttgaggtaggccggcagcacgtgctcgggaaaacccggttgtttctggtccatgttgacggcaacgatctcgaacttgatcggcgcgaccttttgcaggtgcagcagcacgtcgagcatggtgtagctgtctttgccgccggagaggcagaccatgaccttgtcgccgtcctcgatcatattgaaatcggcgaccgcttcaccagccaggcgacgcaggcgtttttgcagtttgttctggttgaccgtaagagtgcccatggcgcttggatccgctagaggtgtgtgacgaaaagccgagtattttaccggtaagaatcaccgagttccattgcgggagggggcttgcccccgattgcggcgtctcagcgactcattgatagctgacacaacgccatcgggggcaagccccctcccactatgatcagcgtccagtcaaaagacctcagcgcgattaaccccaacgtttacagcgcaatttgctctaaaggccctacagttattcaggctatcccttcctatactgcgactagaggtcgcacagctatccaggacctttgaggccatttggcccgtgggcgctccgatggggggcgatggcaataacgacaggagtgactggcatgatccatcatgtcgtggggctttttacccatcccgaccaggaatggcgggaaatccgtggcgataaagaagaaagcatcggccacatgtacctcacccataccttgattcttgcggcgattcccgccgtatccgcgtttatcggcaccacccaggtcggctgggtcatcggcaaccgcgcgccggtgatgctgacccaggaaagcgcattgtggatgaccctgatgtcctacgccgcgatgctcggtggcgtggcggtgatgggcgcgttcattcactggatggcgcgcacctacgacgccaatcccagcatggcgcgctgtgtggcgtttgccacctacaccgccacaccgctgttcattggcgggctggcggcgctctatccacacatgtggctgggcatggtggtgggcacggcggccatctgttacacggtgtacctgctatacgttggcgtgccgacctttatgaacatcgatccggatgaaggcttcctgttttccagttccatactggcggtaggattggtggtactggtagcgatcatggcctttaccgtgatcgtctggggcctgggcgtaggtcccatctacaccaactgagcggaaaaaaacccaggcaaagccaccgcaaggtggctttgtgcatcatgcatgaccattcggcgcctgacagattcggaaacacccagctttgcggcatactggacatctctggagatatgtacagcatgcccgagcaactcaatacccgcgtcgaagattgtttcctgctagccgaatcctttttcaaacgaagcttcaaacgccctcaggtcagcctcaagctgcggggccagaaggccggtgtcgcgcatttgcacgagaacctgctgcgcttcaacccacagctgtaccgtgaaaacagccaacatttcctgaagcagaccgtcgcccatgaagtggcgcacctgattgcccaccaattgtttggcgaacgcatccagccccacggcgaggaatggcaattgatcatgcgcggggtctacgaactgccgccggaccgttgccacacctatgccgtgaagcgccgccaggtcactcgctatatctacaagtgcccgtgcgcagacagtgactttccgttttcgtcacagcgccatgggatggtcgcccagggtcgaaggtatttgtgtcggcggtgccggcagaccttggtgtttaccggcgaaacccgggtggagtgagggcctcatcgggggcaagccccctcccacatagtgaccgcgccgccgacccagtgtgggagggagcttgctcccgatggcgccggtccagtcacccgactaccttggcccgccgcaaagcctctatccgctgaacactgaaccccaactccgccagcacctcatcactgtgcgcccccacggcggcgccaatatgcctgggctcaggcagcccctcggagaactttagcgggcacgccaattgcgcctgggtcgaaccatcgccccgtggcacctggctgaccagttgccgcgctttaagctgcggatgctccaccgcttcactcaggctcaacaccggctccacacacgcatccaccccggcaaacaactcacacaactcatcaaagctgcgtttctcgaattcaacctgcagtgcctgcttgagtgcgggcgacaagcccagcgccgccaactccggccgtcccagcgcgccacagagctgctgcataaacccaggctccaggctgcccactgacatccaacgcccgtcccgcgagcggtaataatcgtaaaagctgccaccgttcagcacatggctttcgcattcaggctcgacgtcgcacgccaggtagcccgcgccggccatggcgttcaggctgaacgagcagtcggtcatgctcacatccagagactggccgaccccgctctgctgccgggcgatgactgccgcgagcagccccaccaccgcatgcagcgagcccccgcccacgtccgccaactgcacgcccagtggcaacggtccactgtcctggcgcccggtgtagctggcgattccggccagcgccaggtaattgatgtcatgcccggcgcggtccttatacgggccggtctgaccgtaaccggtgatcgacacataaatgagccggggattgatcgccttcaacgcctcatagcccaagcccaggcgctccatcaccccaggccggaactgttcgaggacgatgtcgtagtccttgaccagcgtccgcacgatctccagcgcctcggcctgcttgaggtccagcgccaggctgcgcttattgcggttgaggtaggcgtggctggccgacgtgccctggtcgtggggcggcagtacgcgcaacaggtccatgcgcgtgggcgattcgatgcgcagcacctcggcgcccatgtccgccagcatcagcgacgcgaacgggccaggcagcaaggtggaaaaatccagcactttgagggacgccaagggacctgacatgggcactccatttcggttttgaatgcccacagactaggcagccttgcgccagtcggcaatcgccggaacagtcaccaacagtgaccgttttgatcacggcgggctttttcgtggcggcggctttatcattggcccacgtttgcttgcagagtgttccatgaagtttgcgattgcagtgttttgtgccgcccatgcgccctcctcgcgccgcgccctgctgttcgcccaggcggcgctggccggcgggcatgagattgtgcggctgtttttctatcaggacggcgtgtacagcgcgtccaattcggtggttgcgccccaggatgagcaggacatcgcccgtcaatggcgggagtttgtcagcgcgcatcaactcgacagcgtggtgtgcatcgctgccgccttgcgccgtggcgtgctcaaccaggaagaagccacgcgttatcaacgcagtgcggtcaacctcgatgcgccgtgggagctgtcgggcttggggcaattgcatgacgccgcgcaggccgccgaccgcctgatctgttttggagggccgtgacatgtccaaatccttgctggtcatcagccgccaggcgccgtggtccggccccagcgcgcgcgaagcgctggacatcgtgctggccgggggcgcgttcgatctgcccattggcctgctgttcctcgatgacggcgtattccagctggcgccgcatcaagacgccaaggccgtgcagcaaaaggacctcagcgccaatctgcacgcgctgggcctgttcggtatcgacgaggtattcgcctgtagccatagcctggccgagcgcggcctcacgacgcccgccagcgcacagccgctggacagtgctgcgatctcccagttgattgaccgttacgaccaggtgataaccctctgatgtcgactctacatgtggtttcccactccccgtttaccgatagccgcctggacagctgcctgcgtatctgtggcgtaaatgacgccatcctgctctgcggcgacggcgcctacgggttgcacaacgcggcgctgcacaccaaaggcgtgaaggtgtttgtactggccgaagacatgcaggcgcgcaacctgccactgcccgactgggccgacagcgtggactacccaggcttcgtgcagttgtcgctcgactacgacaaggtcaacagctggctatgaacaccctgaccgtaggcactcgcagcctggaactggacaaggacggctaccttgtcgacctgaacgcgtggtccgaagaagtcgccaacgccctggccgccgccgaaccgctggcgttgaccgcggaccattgggaaatcctcacactgctgcgccagttctatgccgaattccagctgtcacccgccacgcgcccgctgatcaagtacaccgccttgaagctgggcccggaaaagggcaacagcctgcacctcaacaaactgttcaacggcactcccgccaaactcgccgccaagctggcgggcctgcccaggccgacgaattgcttatgaccgactttgccccgctgacccttgaaacccctgccgaacacccgtttgcgcaattcgtgcgcatcctgggcaaaggcaagcgcggtgcgcgcaacctcacccgtgaggaggcgcgcgaagccatgggcatgctgctcgacgaaaaagtcgaggacacccagctcggcgccttcctcatgctgctgcgccacaaggaagaaagcccggaagaactggccggtttcaccgaagccgtacgcgaacgcctgaacgctccggcgctgaatgtggacgtcgactggccgacctacgccggcaagaaacgccacctgccgtggtacctgctggcagccaagtgcctggcgcaaaacggcgtgcgcatcctgatgcacggcggcggcgcccacacggcgggacggctgtacaccgagcaattgctggagggtttgcagatcccgctgtgccgcaactggcagcaggtcgaagccgcctacgcacgcggcagcctggcctttatcccgctgggtgactgggcgccgcagttgcaacgcatgatcgacctgcgcaacaccctgggcctgcgctcgccgatccactccctggcgcgcttgctcaaccccttgaatgcgcgccttggcctgcaaagtattttccatccgggttaccagggcgtgcaccgcgatgccagcggcctgctcggcgacaatgtaatcgtggtgaagggcgacggcggcgagatcgagatcaatcccgactcggccagtcacctgtacggcaccactggaggcgaaagctgggacgaagagtggcccgccctctccgcccagcgccacgtcaaaccggccacactcgaacctgagcatctgaaagcgctgtggcgcggtgatgtcgaggacagctacccacaactggccctgatcgcgaccatggccctagccttgcgtggcctgggtcattcacgggaacaagcgttcgccctggcccagcaatactgggacgcgcgggacaaatcgatttaatcgatgattaacccccggtctttgcgcttttagttcgaactcatccctttagactgggctccaacgcttattagcctaggagccagtcatgggtttgctgatcgaaggacgctggaaagaccagtggtacgaaagtagcgcggacggcgcgttccagcgcgaacaggcgcaacgccgccactgggtcaccgccgatggcgcgcccggcccgagtggcgaaggcggcttcaaagccgaggccggtcgctaccacctctatgtctccctggcctgcccgtgggcccatcgcacgctgatcctgcgcaagctcaagggcctggaaagcctgatcgacgtgtcggtggtcagctggctgatgctggaaaacggctggacctttgacaaggcccacggttccaccggcgacaagctgggtgatttcgacttcatgcaccagcgctataccgccgacaccgccgattacaccggacgcgtcaccgttccggtgctgtgggacaaaaagctcaagcgcatcgtcagcaatgaatcggcggagatcatccgcatgttcaacgacgccttcaatgaattgaccggcaacaccctggacttctacccccagccgctgcgcacgaccattgacgcgttgaacgaacgcatttacccggcagtgaacaacggcgtataccgcgcaggcttcgccacctcacagcaagcgtatgaaagtgcgtttgatgatgtgttcgccgagctggatcatctggaacagcacttgggcgaccatcgttacctggccggtgaatacctgaccgaggcagatgtgcggctgttcaccacgctgattcgttttgatgcggtgtactacagccacttcaaatgcaatttgcgcaggattgcggattatccgaatttgtcgaattggttgagggagctgtatcagtggccgggagtggcggagacggtggattttgcgcacatcaaggggcattactatgccagccatcgcacgatcaatccgacagggattgtgccgaaggggccgttgcaggggtttgatgaacagcacgatcggaagcaattgattggcaaaggcgtgtggaactgatccgacgtattggctggcttttagggcctcatcgggggcaagccccctcccacactggaatgcagtccaatgtgggagggggcttgcccccgatgctttcaaggctcagacctgggactgcgcgccctcaaaccacttcagcttctcgcgcaacaccaccacctcacccacgatcaccagtgtcggcgcatgcacttcatgctccgccaccatgcgtggcaaatcggcgagggtgccggtgaacacgcgctgattggacgtggtgccctgctggatcaacgctgcgggggtgtccgatgcacgcccgtgcttgatcagctgttcgcagatgatcggcaagccgatcaagcccatgtagaacaccagagtctgcgaaggtcccaccaggtcatgccagggcaggtccgaggtcccgtccttcaaatgcccggtgataaaacgcaccgactgcgcatagtcgcgatgggtcagcggaatcccggcatatgccgcgcaaccgctggccgcggtgatccccggcaccacctggaacgggatgccatgggcggccagttcctcgatctcttcgccaccacgaccaaagatgaacggatcgccacccttgaggcgcagcacgcgcttgccctgcttggccaggtccaccaattgctggttgatctggtcttgcggtacggcatgatcagcgcgacgtttgccgacatagatgcgctcggcatcacggcggcacagttcgagaatcgccggtgcaaccaggcggtcatacagcacaacgtcggcttgctgcatcaggcgcagggcacggaaggtcagcaggtcgggatcacccggacccgcgcccaccaaataaacctcgcccggcgcataaggcggcgcgccgttgaccttttcgatcagcaggcgctcggcctcatcaccctgcccggccaactggcggtcagcaatcgggccctggaacacttcttcccagaacgcacgacgctgctgcacatccgggtacaagcctttgacctgggcacgaaaacgcgccgccagcccggccagttgaccgtaggtggacggaatccaggtttccagcttggcgcggatcaagcgcgccagcaccggcgcatcgccgccgctggacactgcgatcaccaacggtgaacggtcgacaatcgccgggaagatcacgctgcacaaggctggcgcatcgaccacgttgaccggcacgcaacgacgcttggcatcgctggacacttgcgcgttcagcggctcgtcgtcggttgccgcgatgatcagggtgcaagcatcgaggtcggcctcctgatagccgcgcagaatcagttccccgccactgcccagtaccagttcacgcaactggtcttcgatctggggagcaaccacccgcagcaccgccccggcgtcggccagcagccgggatttgcgcaaggcaatctccccgccaccgacgaccagcacacgactgccgcgcaggttatgaaacagcggcagaaattccatttagcgaatgacctcaacgcccgccatgtacggcttgagcacttccggcacacggatcgagccgtcagcctgctggtagttttccagcacggccaccagggtacggccaaccgccaggccggaaccgttgagggtgtgcaccagctccggcttgccggtttccgggttgcggaaacgcgcctgcatgcgacgggcctggaaatcaccgcagttggagcacgacgaaatctcgcggtacttgtcctggctcggcacccagacttcgaggtcgtaggtcttcacggcgctgaagcccatgtcgccagtgcacagcgccagtacgcggtacggcagctccagcagttgcaggacacgctcggcgttggcggtcaggccttccagtgcgtccatggaggtcgatggctcgacgatctgcaccatctcgaccttgtcgaactggtgctggcggatcatgccgcgggtgtcgcggccggaggcgccggcttcgctgcggaagcacgggctgtgggcgacgaacttgatcggcagttgcttggcgtcgaggatctcgccggagacgatgttggtcagcgacacttcggcggtcgggatcaggtacaggtcggcttcgccgtcgcggctgatcttgaacaggtcttcttcgaacttcggcaactggctggtgcccatcagcgccggcgcctgcaccaggtacggggtgtaggcctcttcgtaaccgtgctcgccggtgtgcaggttgatcatgaactgcgccagggcacggtgcaggcgtgcaaccgggccacgcagcagcgagaagcgcgcgccggacatcttggcggcggtttcgaaatccaggccaccgctcagttcgcccagggcgacgtggtccttgatctcgaaatcaaaggctttcggcgtaccccagcgacgcacttcgacgttgccgtcttcgtctgcgccgatcggcacggattcgtgcggaatgttagggatgcccagcaggatcgaatccagctcggactggatcttttccagctcgaccttaccctcggacagctcggtgcccatgcgctcgacatccgccatcaacggcgcgatgtcttcgccgcgctgcttggcctgaccaatggatttggaacgcgcattacgctcagcctgcagtgcttcggtgcgggtctggacggtcttgcgctgttcttccagcgcttcgatgcgcgcaacatccaaggcaaagccacgggatgccaggcggtccgctacgtcctgaaggttgctacgtaacagtttggaatcgagcatgtcggtctctcgtttatcaaagtttggtcaaggacaggccggcccaggtggcgagcagcccgccgaatacgctgatggccgcatagccaattgccagcggcacttgcccgctttccagcaggcgcacggtatccagtgaaaaggatgaaaaagtcgtcaggccgccaagaaagccaaccatcaggccggcacgtacctcgataggcacttccgggcgcagcaaaaacaggccgtataacacgccgatcaacaggcagcccacgatattaacggcgagcgtcgccgtatagaagtgtttcggccaattggcgttgatccaattgcccgtggcaaagcgcagcagtgtacctgcgataccacccgccgaaacggcgacaaccagaggaatcatgactttctccgctgccgggggctcaggcggtcgagggtggcaaggtgattaagcttttcaccaatcttcagctccaggccacgaggcaccggctgatacaacggcaacggctcaagctcatcgggaaaatagtcttcaccggccgcataggcatccggttcatcatgggcgtaacggtattcatcgccataacccagctgcttcatcagcttggtcggcgcattgcgcaagtgcatcggcacttcgagcgagccatattcggcggcggcgcgcagggcggatttgaagcccatgtaaaccgcattgctttttggcgcgcaggccaggtaggtgatggcctgggccaccgccaactcaccttccgggctgcctagtcgttcctgcacgtcccatgccgccaggcacaggctcagggcacgcgggtcggcgttgccgatgtcttcgctggccatgcgcaccacgcggcgggccaggtacagcgggtcgcaaccgccgtcgatcatgcgtgcaaaccagtacagcgcaccatcggggttggagccgcgcacggatttgtgcagcgccgagatctggtcgtagaaggcttcaccgcccttgtcgaagcggcggcgcgtgtcgccgagcaggctttgcaggaggtcgacgccaatctcaccgccgtcttcggccaggtcggaggcgttttccaacaggttgaggaaacgacgaccatcgccatcggcggccgtcagcaggatcttgaagccctcttcgctcacgctcagttggcgcttgcccaagcccttgtcttcgttcaaggcgcgctgcagcagcttctgcatcgccgcctcgtccaggcttttcagcacatagacccgcgcccgcgacagcaaggcgttgttcaattcaaacgaagggttctcagtggtggcaccgataaagatcagcgtgccgtcctccacatagggcaggaacgcatcctgttgcgacttgttgaagcgatgcacttcgtcgacgaacaggatggtgcgcttaccatactgcccggcctgctgcttggcgacttccaccgcctggcggatctccttgaccccggcgagtaccgccgagaccgtttcgaagtgcgcatccgagacttttgctaagagccgcgccagggtggtcttgcccacccccggcggcccccagaaaatcatcgagtgcagcgcgccctgctccagggcttcacgcaggggcttgccgcgagcgagcaggtgttcctgaccgacgtactcatccaggttggtcgaacgcaggcgtgcggccaatggctgggcaatcgggtcacttcgaaacagatccatgggcagcgtttgaaacctctggggaatttattcctggatcacgtcggcacccttggggatgtcgaacttgaacttggacgccggtaccggctggttggccttgaccccggagaacaggatatcggtgcgctggccgacactgtcgatcaggcgcatgttgttgatcacgccgttaccgaacgacaaggacagggtgtcgaacagcgtgtccttggatttcggcttgagggtgaactcgatcacgttgctggtctgcttggaggtaatgtcgaagctgtcattgatcttcgacacgtcacccgagagcaacagcgccggagtctggttcaggcgcgggtcgagcttcttgatggtcgcctgttccaggtccgggtcccacagggtgaccttctggccatcggacacgatggtctgctcagccttgccttcggtgtgccaatagaacaggccaggacgctgcacggccatttcgccagcggtttcctgcaactgggtgcctccggcatccaaggtcaactgggaaaagcgcgcggtcagggtctgggatttgtcgagcaggttcttcaggctggcgacggaggccgggtcagcgtgagccgaaacagcggtcagggccagtgccggcaacaacagcatgcggataaagcgcatgggagtcctcattgagtagtcagggcgcgccgcgtgctgtcacgcggcgcgggatcagtcgcgcatctgcccgggggcaatgacttcgcgcgagccgttggtgttcattgcggtcacgacgccagcgttttccatggcttcgatcatacgagcggcacggttgtagccgattttcagcttgcgttgcaccgcggaaatcgaggctcgacggctttcgagcacgaacgccacggcttcatcgtacagcgcatcggtctcggcatcatcgtcgccaccgccgctgccgccatcgaagccgctgccggcttcttccacaccggcgaggatgtcatcgttgtactccggtgcgccgcgcagtttccaggcttccaccacacgatgcacttcatcgtcggaaacaaaggcgccgtgcacgcggatcggcaggctggtgcccggcggcatgtagagcatgtcgccgtggcctagcagttgttcggcgccgccctggtcgatgatggtccgcgagtcgatcttgctcgacacctggaacgccatgcgcgtcgggatgttggccttgatcaggccggtgatcacgtccaccgacggccgctgggtggcaaggatcaagtgaataccggcggcacgggccttctgggcgatacgcgcgatcagctcttcaaccttcttgccgacaatcatcatcatgtcggcgaattcgtcgaccaccaccacaatggtcggcagcttggtcagctttggcgcttcgtcgtgaatgctttcgcgccggtacaacggatcatcgatggtctcgccgcgctcgtgggcttccttgatcttggcgttgaagcccgacaggttacgcacgcccatcttcgccatcagcttgtagcggcgctccatctcggcaacgctccagcgcagggcgttggcggcgtccttcatgtcggtgaccaccgggcacagcaggtgcggaatgccttcgtagatcgacagttccaacatcttcgggtcgatcatgatcagcttggcgtcttccgggccggacttgaacaggatcgacaggatcatcgcgttcacccccaccgacttaccggaaccggtagtaccggccaccagcaggtgcggcatcttcgccaggtcggtgatcaccggcttgccgccgatgtcatggcccagggccagggtgaccggcgatttgaagttgtcgtactcgggcgtcgacagcacttcggagaagcgcacgatctggcggtcttcgttgggaatctcgatacccacggtggtcttgccgggaatcacttccaccacacgcacactggtcacggccagggaacgggccaggtctttcgccaggttggagatgcgactgaccttcacaccggcggccggctggatttcgtaacgggtgatcaccgggccgggatggatggagtccaccgacacttcgacaccaaactccttgagcttgatttccagcaggtggccgacggccgccagggattccggagaatagttgagttgtttcttttcggccgggtcgaggatcgagatcggcggcaaggtgccttcgacggcgctgtcgacgaacaacggtgcctgtttctctttctgtacgcgatggctcggttcggccggcttgggcggcgcgggggcaatcactggcggcacctgtttctcgcggtccgacatgtgcttgctcagggcctgctcgcgctcgatcaggcgttccttgacctttgcctgctcgcgccggtccggtgtgctcggcgccaccacttcgttgacacgggtgtccacctcacgcagctgggcaaccatgcgcttgcgctcgacacgggccgcccaccagcggttggcggcgccctggaacagctccagcaagtcgagggtgatcttgccggtcacgtccatcaccttgaaccatgacaggtcggtgaacacggtgaggccgaacaggaacagtgcgatgaacatcagggtgctgccctggatattcagggtccggcgcgccaggtcgccgaggctttcacccagcgcaccaccggcgcccgccggcaggccggtgggtgcatggaaatggatatgcgccagggccgcgccggacaacaccaggaacaccaggccgatcaggcgccaggaaaacagccatccgctccactgccacggctcgtggcgctggcggaagatctgccaggtcttgatcgccaacagcaacgggaagatataggcgaagtaacccagcaccatgaacaggatatctgcgctgtaggaaccggcaggcccaccgaagttctgcacgtcttcgatcttgctgttgtggctccagcccggatcgtccttgccataggtcagcaaggccatcatcaggaacaggcacagtgcgccgatggcgatcagcgcaccttccttgaggcgataatgcaggtgctgacgccaggccggcacgactgctgctttaggtgttgcggcggatttcttcaaaacgggtcttttcctgcgccttgagcgcgtccatctgttgaatgactgcaaatactgcccaatccgagcagctgaaaaatgaacgagcgtcgttgaatctactgtttaacaccgggcgattgctggatgaaatgacgataacgccacaatggccgcattgtacgggtttgtctccctgatgccacgccgcttggcgctcttccagcagcatagccaattgtgtgtcacaagatgttcaatttgagcatgcattgtctttgctgacaaaggcttatgagctgtttttaccaatccaggcaagcttggcaaatggcctgcatggaatagacccgattacgaccacgcccccggcatagagttgcagaaacacctgctcacgctaatcccccttaatgcctgattcgggctggcccgatggcgccaggtcgacaataatcagcactgccgccgcaggtgccatacctgccactcccctccccttccgcaaagcctggatgccatgctgacctggttacaacgcgattcaatgatcttccctgccttggccaaagccatgcgcgaacccaatggcctgctcgccgccggcggtgacctcagcgccgagcgactgatccaagcctatcgtcatggctgcttcccgtggttttccgagggccaaccgatcctgtggtggtcgcccgacccacgcaccgtgatattccccgacgaactgcatgtatcgcgcagcctgggcaaactgttgcgccaacagcgctacagcgtgaccttcgaccaggacttcgccgccatcatccaggcctgcgccgcacctcgcgcctatgccgatggcacctggatcaccgaaggcatccagagcgcctacctggaactgcaccagcgcggctacgcgcattcggttgaggtctgggacaagggtgaactggtaggcggcctgtatggcctcgcaatgggccggctgttttttggcgaatccatgttcagccgcgccgacaacgcctcgaaattcggctttgccacgctgacccgtcaattgcaggcctggggttttgtgctgatcgactgccagatgcccaacgaccacctgcacagcctgggtgcccgcgccatatcccgcaacgacttcgcagggttcctgcgcgaccatctggaccagcccaacgccggaccatgggtttcctaggcgacatcggcgctcctggcttacacttatttcaaagcttatccgagggttgatcatgaccgagttggcgcgtttgaagttttatgccactcaaccccactcttgcagctatctgcccgacgagcaggccaccacactgttcctcgaccccagccagcctatggacgtgcatgtgtatgccgacctgtcggagatgggctttcggcgcagtggcgaccatctgtaccggccgcattgccagaactgtaatgcctgcgtgcccgcacgcatccccgttgcgcagtttctgccggaccgcaaccagaaacgcatcctcaagcgcaacgccgacctgacggtgacatctgccaagccgcgcttcaccgaagaatatttcgacctttaccagcgctacatcgagcaacgccacgccgacggcgacatgttcccgcccagccgcgatcagttttccacctttctggtacgcgacctgcccttctcgcgcttctacgaatttcgtgcgaacggccgcctggtggccgtcgcggtgaccgatctgctgcccaatggcctgtcggcggtctacaccttctatgaacccgccgaagaacgccgcagcctcggacgcttcgcgatcctctggcaaattggcgaagccttgcgccaggaactggaggcggtgtacctcggctactggatcaagaactgcaaaaagatgaactacaagacccaatatcggcccatcgaactgctgattaatcaaagatgggtcgtgcttaactagaaccccttggcttaaacaccctttttcgggcacaatgcacgccgcttttgcctggcgcagttgcaccgggccattcactggataccgagggctttactgcatgtcgaaagaagacagcttcgaaatggaaggcactgtcgtcgacaccctgcccaacaccatgtttcgtgtggagttggaaaatgggcacgtcgtaaccgcgcatatctccggcaagatgcgcaagaactacattcgtattcttaccggtgacaaagtgcgcgtcgagctgacgccctatgacttgagcaaagggcgcatcacttaccgcgctcgctaagcaagtcaatacaaaacgcccggttatgccgggcgtttttgtgtgtgcgctatttaccaaacgccaaaaccaaatgtgggagggggcttgctcccgatagtggtagatcagtcactcatgtagcgactgaaacactgctatcgggggcaagccccctcccacattgacgcccaccgctatcgatcaggccatttcagccgtggtttcgaactcgaaggtcagctcgccgtccttcaggtcgatgtgcaccacgccaccatggtcggagagctcgccaaacaggatctcttcggccagtggccgcttgatcttgtcctggatcagacgcgccattgggcgtgcgcccattgccgcatcgtaaccgccttcggccagccaactgcgcgccgcgtccgtgacctccagctgcacgcgcttgtcttccaactgcgcctggagctcggtaaggaacttgtccaccacacttttgataacctcatggctgaggcgaccaaactggataatggtgtccaggcggttgcggaactccggcgtgaagctcttcttgatcacttccatggcatcagacgagtggtcctgatgcgtgaagccgatcgaagcccgcgcggccgtttcggcaccggcgttggtggtcatgatcacgatcacgttgcggaagtccgccttgcgcccgttgttgtcggtcagggtgccgtggtccatcacctgcaacagcaggttgaagacttcagggtgagccttctcgatttcatcgagcagcaatacacaatgcggttgcttggtaatcgcctcggtcaacaggccgccctgatcaaagccgacataacccggaggtgcgccgatcaggcgcgacacggtgtgacgctccatgtattcggacatgtcgaaccgcaccagctcgatacccatggccttggccaattggcgcgccgcttcggtcttgccgacgccggtcgggccggcgaacaggaacgaacccaccggcttgtctggcgacttgaggcccgcacgcgacagtttgatcgcagtggacagcgagtcgatggccgcgtcctgaccgaacacggtgagcttgaggtcacgctccaggttacgcagcagctccttgtcggaactggtgacgtgttttggcggaatccgcgcgatcttcgccacgatgtcctcgacctgcggcacgtcgatgcgcttcacacgcttctcgaccggctgcaggcgctgataggcgcccgcctcgtcgatcacgtcgatggccttgtccggcatgtgccgatcattgatgtagcgcgacgccagctcagcggccgaacgcagggcttcatcggtgtactcgatgccgtggtgcgcttcgaagcgccccttgagcccgcgcagaataccgatggtgtcttctaccgaaggctcggacacgtcgaccttctggaagcgacgtgccagggcacggtctttctcgaagatgccacggaattcctggaacgtggtcgagccgatgcagcggatatcacccgacgacagcagcggcttgagcaggttggaggcatccatcaccccaccggaggccgcaccggcaccaatgatggtgtggatttcgtcgatgaacaggatcgcctgcgggcgttttttcagctcacccagcagcgccttgaagcgcttctcgaagtcgccacggtacttggtcccggcgagcaaggcgcccagatcaagggagtagacgacgctgttggccagcaggtccggcacctggttgtccacgatgcgcttggccaggccttcggcaatcgcggttttacccacgcctgcctcgcctaccagcaacgggttgttcttgcgacgacgcgcgaggatctgcgctacacgctcaacctcaagctcacgccccaccagcggatcgatccgcccctggcgcgccagctcgttgaggttgctggcataggcatccagtggattgcccgaagaagaagactcaccgccctcgtcgtcctgcatatcctgctcaccctcggaatgatcgccgtgcccgggcaccttggagataccgtgggcgatgtagttgacgacatcgatacgggcaacgctctgctgtttaagcaggaacactgcctggctttcctgttcgctgaaaatcgccacaagcacattggcgcctgtgacttcacgcttaccggagctctgaacatggaacacggcacgctgaagcacccgctggaagcccagggttggctgggtctcacggtcttcatcgtggactggaataagtggcgttgtggagtcgataaactcctgcaggtcatgcttgagtttgtcgaggttggcgccgcacgcacgcaaaacggtggcggcagcttcgttatccaaaagtgccagcagcaggtgttcgacggtcatgaactcatgacgcttcgaacgagcctccttgaaggcaagattgagggtgacttcgagctcgcggtttaacatagcttcacctcatacccaagtggtcggcgttaaccgtccttctcgatttcacagagtagcggatgctggctttccctggcgtactggttgacctgcatggcctttgtctcggcgatgtcgcgggtaaacactccacatactgcccgtccttctgtgtgaacggccagcattaccttggtcgccaactcgcggttcaggttaaaaaacacctcgagtacttcgaccacgaaatccatcggtgtgtagtcatcattgaacaaaaccaccttgtacatcggcggcgcctgtagagcaggcttggcctcctgaacagcaatgcctgcagaaccgtcgtcatcatgttcctgatccggtcgatcctgattgaatgttagtcgaatctggctgtttgcatgcatggaaagaaaggttcgtcagtggttcaaatacagtggtgggggcgacctgtcagattttcaactactgaccgactggtcgccttgactatcggcgaaacggtgttacaaccaatagaacccacagtgggtaaaaaaggtccgcgcagtcaaccttatttattcgggttaggacggataaactggatgatactccagtgatggagtctggtgcagagggatatgggcatggcaagcggtaaggtcaagtggttcaacaatgccaaaggttacggcttcattaatgaagacggcaaggatgaagacctttttgcgcattactcagcgatccaaatggacgggtataaaacgctgaaagcggggcagccggtctcctttgacattattcaggggcccaaaggcaagcacgcagtcgcaatcagtgcgccagtcaccatcggcacagcaaaagacggcgtcgctcaaaaaccaaaagagcaactggcctgatcggccaccgagcaagcgcctaataaaaaaccggccattccgtttacggtatggccggtttttttattgccaatcgcttacatatgcgagatcagcgcatcaccaaagcccgacgacgacaccagcttcgcaccctccatcagacgctcgaagtcataagtcacggtcttggccgaaatcgcaccattggtgcccttgatgatcaagtcagccgcctcgacccagcccatgtgacgcaacatcatttccgccgacaaaatcaacgaacccgggttgacctggtccttgcccgcatacttgggcgcagtaccgtgggtcgcctcgaacatcgccacggtatccgacaggttggcgcccggcgcaataccaataccgcccacttccgccgccagggcatcagacaggtagtcgccgttcaggttgagggtcgcgatcacgtcatattcagccggacgcagcaggatctgctggagcatggcgtcggcaatcgcatccttgaccaccacgttcttgccggtcttcggattcttgaactgcatccaagggccgccgtcgagcagcgtggcgccaaattcttgcgccgccacctcataggcccattccttgaaggcaccttcggtgaacttcatgatgttgcctttgtgcacgatggtcagcgaatcgcggtcgttatccactacatattgcagggctttacgcgccaggcgctgggtgccctctttcgagaccggcttcacgccaatcccgcaatcctggtcgaaacggatcttggtcacgcccatttcttccttgaggaacttgatcaccttgatcgcttcgggcgaaccggccttccactcgatcccggcataaatgtcttcggagttttcccggaagatggtcatgtccacgtcgccgggcttcttgaccgggctgggcacgccttcgaaccagcgcaccgggcgcaggcacacatacaggtcgagttgttggcgcagggccacgttcagcgaacggatgccgccccccaccggggtggtcagcgggcctttgatggaaaccacgtaatccttgaccgcatccagggtttcctggggcagccaggtgtcctggtcgtagacttgagtcgctttctcgccggcaaaaacctccatccacgagatcttgcgcttgccgccgtaggccttttcaacagctgcgtcgactaccttgatcatcaccgggctgatgtcgacgccgataccgtcaccctcgatgtaggggatgatcggttggtcaggaacattgagagaatggtctgcattgacggtgattttgtcgccgactgccggaacctgaatcttcttgtatcccatgctgaactccatctatggattgaacatctggctgcgttcgagcctactccagataaatggcgactgaaacctcgcgccatgctcatttgcttcgaaaacagcataatttgtcgcctacaagcctgaaagaaaaggcaaaatcgccaatcttgagcacatcgtgcgactttggtcgcaatcgcgcacctgcgacctttagaccaatggacgacacaccttttgtatgaaggctcggcgtaagcatagcgacctatgtataatgccgccgctgaccaaagagtcacgacggcggaccgctctagaacacagccttccgctacaaagcaggactattacaatagtccacccgcttgacgctcgactgatgcaacccaacatcaccgcgaagaaacctcgacatttcgctcatggatgactttgaacgaacgcgctccacccggcgcatctcgagtttctgcgcacgctttcagcaaagaagagagttaatccgaatatgcccacccgctcgaagatcatctacaccttcaccgacgaagccccggccctcgccacctattcactgctgcctatcgtagaggccttcaccgcttccgctgatattgccgtggaaacccgcgacatctccctcgccgcgcgcatcctcgcaagcttccccgagcaactgggcgccaaggctatcccggaccacctcgccgaactgggcgacctggccgttacgcctgaagccaacatcatcaagctgcctaacatcagcgcctcgactccgcagctgcaagccgcgatcaaggaactgcaggcccagggctacgccctgccggactacccggaaaccgtaaccaccgacgcggaaaaagaaacccgtgcacgttacgacaaggtcaagggcagcgccgtgaacccggtactgcgcgaaggcaactccgaccgccgcgcaccgctgtcggtcaagaactacgcacgcaagcacccgcacaaaatgggcgcctgggctgccgactccaagtcgcacatcgcccacatgagcaacggcgacttctacggcagcgaaaaagccgtacagatcgaaggcgctgatgctgtcaaaatcgagctgatcgcccaggacggcaccgccaccgtcctgaaggaaaagacctcggtacaggcaggcgaaatcatcgacaccgccgtgctgagcaagaaggccctgcgcgcattcatcgccgctgagatcgaagacgccaagaaacaaggcgtgctgctgtcggttcacctgaaagccaccatgatgaaggtctccgacccgatcatgttcggccagatcgttgccgagttctataaagacgccctggccaagcacgccaccgtgctggaacagatcggcttcaacctgaacaacggtatcggcgacctgtacgcgcgcatcaaggccctgccggccgagcagcaagcacagatcgaagccgacatcgcagcggtctacgccgctcgccctgccctggcgatggtcaactccgacaaaggcatcaccaacctgcacgtgccgagcgacgtgatcgtcgacgcctcgatgccagccatgatccgtgactccggcaagatgtggggcaccgatggtcagctgcacgacaccaaggcggtgatcccggatcgctgctacgccaccatctaccaggctgtcatcgaagactgcaaagccaatggcgccttcgacccaaccaccatgggcagcgtgccgaacgttggcctgatggcgaagaaagccgaagagtacggctcccacgacaagaccttccagatcaaggctgacggcgtagtccgcgtcaccgacagcaagggcaacctgctgatggaacagaacgtcgaagccggcgacatcttccgcatgtgccagaccaaagacgcgccgatccaggactgggtcaaactggccgtcaaccgtgcccgcgccagcaacaccccggccatcttctggctggacccacagcgcgcacacgacggcgtcgtggtcgagaaggttcaggcttacctgaaagaccacaacaccgaaggcctggacatccgcatcatgtcgccggtcgacgcgatgaagttcaccctggagcgcacccgcaagggcctggacaccatctcggtgaccggcaacgtactgcgcgactacctgaccgacctgttccctatcatggaactgggcaccagcgccaagatgctgtcgatcgtgccgctgatgaacggcggtggcctgttcgaaaccggcgccggcggttcggcaccgaaacacgtgcagcaactggttgaagagaacttcctgcgctgggattccctgggcgagttcctggccctggccgcctcccttgagcatttgggtgtgacgtacaacaacccgaaagccctggtcctgtccaagaccctggaccaggccaccggccagttcctcgacaacaacaagtcgccatcgcgcaaagtcggcaacatcgacaaccgcggcagccacttctacctggcgctgtactgggctcaagccctggccgcccagaccgaagacactgcactgcaagcgcagttcggcgaactggccaagaccctgaccgcgaacgaggcaaccatcgttgccgagctcaacgccgtccagggcaagccagtggacatcggcggctactacgcgccgaacccggaactgaccagcaaggccatgcgcccaagcaacaccctcaatgcggcgattgccaagttgaagtaaggttgtaaggatgtaaagaagccccggccccgtgccggggtttctgtttaatgtgctttcttgctgaaaaaacccaatcaaactgtgggagggggcttgccccccgatagcagtaggtcaggcacagatagttcaactgacactccctcatcggggcaagccccctcccacactgactattatcctgtttcaggactgcaccgcatcttaaatccagaggcaaccatgacctggcaaccccacatcaccgtcgccaccatcgtcgaagacaacggcaagttcctgatggtcgaagagctcaagggcggccgcgccgtgctcaaccagcctgccggccacctcgacccagacgagaccctgaccgaggccgccgtacgcgagaccctcgaagaaaccggctgggacgtcgaagccatcggcatcgtcggcatctacctgtacaccgcccccagcaacggcgtgacctaccaacgggtctgcttcatcgccaaggccctgaaacaccacccggactatcaactcgacgaaggcatcctccgcgcccgctggctgagccgtgacgagctgatgagcgtgcgcgacgactggcgcagcgagctgatcatccgctgtatcgatgattatctggccggccactgccacagtctcgaattgatccgcccttctctttagccttgaaggcccgagcctgatagaatcgcgtcctttttcaagacacccgttgaaaccctatgcgtgatccagccccttctgacacacaaaagaagcgcgtcatcgtcggcatgtccggcggcgtggattcttccgtttccgccgttctgctcatggagcagggttatgaggtggaaggcctgttcatgaagaactgggaagaagacgatggaacggaatactgcaccgccatggacgacctggcggatgcccaggccgtgtgcgacaagattggcatcaagctgcacaccgccaacttcgccgccgagtactgggacaacgtgttcgagcacttcctggccgaatacaaggccggccgcacgccgaacccggacatcctgtgcaaccgagagatcaagttcaaggcgttcctcgactacgccatgatgctcggtgccgacctgattgccactggccactacgtgcgccgccgcgacatcgatggccgcaccgaactgctcaagggcctggacccgaacaaggaccagagctacttcctgcatgccgtcggcggcgaacagatcgccaagaccctgttcccggtaggcgagctggaaaaacccgaagtgcgcagaatcgccgagaaacacggcctggctaccgccaagaagaaggattccaccggcatctgctttatcggcgagcgccgcttcagcgacttcctcaagcaatacctgccggcgcaaccgggtgagatccataccaccgaaggcgaagtcatcggccgccaccatggcctgatgtaccacaccatcggccagcgccagggcctgggcatcggcggcttgaaagacgccggtgaagagccgtggtacgtgctggtcaaggacttggaaaacaacgtgctgatcgtcggccagggcaacgaacacccactgctgttctccggcgccctgctcgcctccgagatctactgggtcaacccgatcgacctgagcacgccacgccgcctcaccgccaaggtgcgctatcgccagagcgaccagccgtgcaccctggaaaaaaccgccaccggctaccgtgccacctttgatgacccgcaacgcgcggtcaccccaggccagtccgtggtgttctacgatggcgaaatctgcctgggcggcggcgtgattgaaatcgccgaagcctggagccacaaggcatgagcccgacccaggagcaattgacggcactgggcggggtgttcctcgccgcggtattggtggacaagatcgccaagaccggccaggtcaccgaagccggcctgacctgcatgctcggcagcctgctgatccgcgaccccaaggacactctggaagtctacggtggcgacgacctggcgctgcgtgaaggttaccgcgcactgatcggcgccctggagcgcgaccccagcaccctgcagcgcgagccgctgcgctatgccctgtcgatgctcggcctggagcgccaactggccaagcgcgaggacatgctggaggtcatcggcaaacgcctgccgcagatccagtctcaggtggaacacttcgggccggcccacgagaacgtaatcgccgcctgtggcgcgttgtaccaggacaccttgagcaccttgcgccagcgcatccaggtgcacggcgacatgcgcaacctgcaacaaccgaacaacgcctcgaaaatccgcgccctgctgctggccggtattcgttcggcgcggttgtggcgccagttgggcggccatcgttggcagctggtgatcagccgtcgcaaattgctcaaagagctttacccgttgatgcgcaacgaataagtcgcagcagcaggccattttcaagccgttacgcgtaatacgccggtcagttggcaacggaccggcggattttttcatgtatgatacgcgccccatttcgttgcccgactgtccgagaacaccccatgcagctctcttcgctcactgcggtttcccctgtagacggccgctacgccggcaaaacccaggccctgcgccctattttcagcgaatacggcctgatccgtgctcgtgtactggttgaagtgcgctggctccagcgcctggccgctcaccccgccatcagcgaagtgccggcgttttccgccgaagccaacgctgtgctcaacaccctggcggaaaacttctccctggagcacgccgagcgtgtgaaagagatcgagcgcaccaccaaccacgacgtcaaagccatcgaatacctgctcaaagagcaagcggccaagctgccggaactggcccaggtcagcgaattcatccactttgcctgcaccagcgaggacatcaacaacctgtcccacgccctgatgctgcgcgaaggccgtgatgacgtgatgctgccgctgatgcgccagaccgccaacgccatccgcgaactggcgatccgcttcgccaacgtgccgatgctgtcgcgcacccacggccagccggcgtcgccgaccaccctgggcaaagaactcgccaacgtggtgtaccgcctggagcgccagatcgctcaagtcgccgccgtaccgctgctgggcaagatcaacggcgccgtgggcaactacaacgcccacctgtcggcctaccctgagatcgattgggaagccaacgcccgtgccttcatcgaagatgagctgggcctgggcttcaacccgtacaccacgcagatcgaaccgcacgactatatcgccgagttgttcgacgccattgcgcgcttcaacaccatcctgatcgacttcgatcgcgatatctggggctacatctccctgggctatttcaagcagcgcaccattgccggtgaaatcggttcgtcgaccatgccgcacaaggtcaacccgatcgacttcgaaaactccgaaggcaacctcggcatcgctaacgccctgttccagcacctggccagcaagttgccgatctcccgctggcagcgcgacctgaccgactccaccgtactgcgcaacctcggcgtaggcttcgctcacagcgtgatcgcgtacgaggccagcctcaaaggcatcagcaagctggagcttaacgagcagaagatcgccgctgacctggacgcgtgctgggaagtcctggccgagccaatccagaccgtgatgcgccgctacaacatcgaaaacccatacgagaagctcaaagagttgacgcgcggcaagggcatcagccctgaagcgctgcagactttcatcgacggcctggacatgccagccgccgccaaggccgagctgaaactgctcaccccggccaactacatcggtaacgctgtagagcaagccaagcgcatctgatcatcgcaagaccctttgagacgcccggccgcgccgggcgtttttattccagtctgaaaagtgctttttttcaataggttacacatgaatcctgatatccctcttcaacttctgggcggcatcacggcacgggaattcctgcgcgactactggcagaaaaaaccgctgctgatccgccaggccattcctgatttcgaaagcccgatcgacgccgacgaactggccggcctggcgctggaagaagaagtcgagtcgcgcctggtgatcgagcacggcgagcgcccctgggaactgcgccgcggcccgttcgccgaagacgccttcagcaccctgcccgagcgcgagtggaccttgctggtgcaagccgtcgaccagttcgtaccggaagtggccgagctgctggagcagttccgcttcctgccgagctggcgcatcgacgatgtgatgatcagcttcgccgcaccgggcggcagcgttggcccgcacttcgacaactacgacgtgttcctgctgcaagcccagggcaagcgcaactggaagatcggccagatgtgcagctccgaaagcccgctgctgcagcacgccgacctgcgcatcctcgccgaattcgaagaaagcgccgagtgggtcctggaaccgggcgacatgctctacctgccaccacgcctggcgcatttcggcattgccgaagacgactgcatgacctattccgtgggcttccgtgcaccgagcgcggccgaagtgctgacccacttcaccgacttcctcagccagtacctgaccgacgaagagcgctacaccgacgctgacgcccagccggtcagcgacccgcaccagatccagagcgacgcgctggaccgcctcaagagcctgctggccgagcacatgagcgacgagcgcatgctgctgacctggttcggccagttcatgaccgaaccgcgctacccagaactggtagccggcgaagagttgggcgaagacgacttcatcagcagcctgcaagatggcgccatcctggtacgcaacccgagcgcgcgcctggcctggtccgaagtggacgacgatgtattgctgttcgccagtggccagagccgttacctgccaggcaaactgcgtgagctgctcaagctggtgtgctcggccgatgcgctgcacagcgagaacctgggcgaatggctggcggacgaagacggccgcgatctgctgtgcgaattggtcaagcaaggaagcctgggatttgccgatgaataggattcacgtaagtgtcgcggactggcaaaaggatatcgccgagattcggcgcattcgtgaagcggtgtttatcgctgaacaatcggttccaccggagctggagtgggacgcggacgacgccggcgcagtgcatttccttgcattcgaaggtaattttccgatcggcaccgctcgcctgctgcccagcggcgagatcgggcgcgtgtcggtactcaaggattggcgcgggcttaaagtcggcgacaagctgatggaagcggtgattggcgtggccgagcaacgcggccagaccaagcagttcctgagtgcgcaggtgtatgccgcgccgttctatgagcgactgggcttcaagatcgtcagcgacgaattcctggaagtcgggattccgcatgtggatatggtgcgcgagggctgattcgagaccgcgtcgctgccatcgggggcaagtcgaatcgtcgcaccgcccctcccacannnnnnnnnnnnnnnnnnnnnnnnnnnnnnnnnnntgtgggaggggcggtgcgacgattcgacttgcccccgatagccatttcagcaacaccaacaatgccctgccatgccagggcattttgccgtctaggattcaacttgcacccggccaggccgacaaactggcactatcaagcctaaatgactcgcagagataacggacatgtccctacgcaccctgctcaccgccctcctgttagccaccagcgtcacggccatggccgacaccgaagtggtcaacctgagcaaccgtaccagcgcagacctgctgcccgtggcgcagaacttcatcggcaaggacggcaccgtcagcgcttatggcaaccagctgatcgtgaaggccgaccccggcaagatccaggacctgcgcgccttgctgtctcagctggacactccggccaaacgcctgctgatcaccgtcgacaccaacgaaaacaaccagcagaacaccggtgacagccagacgcgcatcatcagctacggcaccaccagccgcgacggcggtacgcagcagatccaggccagcgaaggcgtgcctgcgctgatccaggtcggccagagcgtaccgctgaccaccacccagcaagatagctacggccgcctgcaaaatcagacccagtatcgcaacgtgacccagggcttctatgtgaccgcgagcgtcaccggcgagaccgtgcacctggcgatcagcaccaatcgtgaccgcatgagccaggagcgtcccgatgtagtgaacgtacagagtaccgacacaaccatcagtgggcgcctaggcgagtggatcaccctgtccggcatcaatcgcgagacccaggctgataaatcctctacaacccgcagctactctactcagggccgtgatgacctgacggtgcgggtcaaggtcgacaccctgaactgaagcaccaaaaactgactgatgagtcgtattagactaaagatgtagtgcttgaaaaaaagcactacaaaacatttgacgatccaaaaaagcctgggcatgatggcctcgctcccgctaatcaggggccctggcaagggccttcggatcgcgctccaagctacccacctgagccgattcgtgtctgtaccgcccacaaggcgtgtttgacgaggttgcgactggaacgaagttgtcccgagggacggaagctaaccaggtaacccggctacacgctgttgaacacccgagggcccacgacgcccgaagactgttctcggcccgcctgtacctgcccgaccctctcgccactcgttcatcccgtcgcattccccgccagacccgacatgaccgcctaagcttctggtcagcgagcagccctgcccacgcacttgaatgcagggctggcaaatggatttttccaccacacgaagacgcgacgaggtttacttccatggcactgacacgcgaacagcaaattgcagccctcgagaaagactgggctgaaaacccacgctggaaaggcgtgacccgcgcttattccgctgctgacgtcgtccgcctgcgtggctcggttcaacctgagcacacctttgcaaaactcggcgccgagaagctgtggaagctggttacccaaggggccaagccttccttccgtcccgacaaagatttcgtcaactgcatgggcgccctcactggcggccaggcagtccagcaggtgaaagccggtatccaggcgatctacctgtccggctggcaagtggcggcggacaacaactccgccgaatccatgtaccccgaccaatcgctgtacccggtggactcggtgccgaccgtggtcaagcgcatcaacaactcgttccgtcgcgccgaccagatccagtggaaagccggcaagaacccgggcgatgaaggctacatcgactacttcgcgccgatcgtggccgacgccgaagccggtttcggcggcgtactcaacgcctacgagctgatgaagagcatgatcgaggcaggcgctgccggcgtgcacttcgaagaccaactggcttccgtgaagaaatgcggccacatgggcggcaaggtcctggttccaacccaggaagctgtacagaagctgaccgctgcccgcctggccgctgacgttgccggcacgccaaccatcatcctggcgcgtaccgatgccaacgcggctgacttgctgacttcggactgcgacccgtatgaccagcccttcgtgactggcgagcgcacccaggaaggcttctacaaggtacgtgccggtctcgaccaggccatcgcccgcggcctggcctacgcgccgtacgccgacctgatctggtgtgaaaccgccaagccggacctggacgaagcccgtcgtttcgccgaggcgatcaagaaggaatacccggaccaactgctgtcctacaactgctcgccgtccttcaactggaagaagaacctggacgacgcgaccatcgccaagttccagcgcgaactgtccgccatgggctacaagcaccagttcatcaccctggccggcatccacaacatgtggcacagcatgttcaatctggcgcacgactacgcccgcaacgacatgaccgcctacgtgaagctgcaggagcaggagttcgctgacgccgccaagggttacaccttcgtggctcaccagcaggaagtgggcaccggctacttcgacgacatgaccaccgtgatccagggcggcacctcgtccgtgaccgcgctgaccggctcgaccgaagaagagcaattccactgatcgactgagtacacggccactgcggccccaaggaagacctaaccgcagtgccgcacaaagatcacgccccgacctgttcggggcgttttttttgccccgtgaaaaacctccctgtcaaaatgaagatcaacctgtgggagggggcttgcccccgatggcggcgggtcaatcacagacgtatcaactgacatcccgtcatcgggggcaagccccctcccacactggaaatgccgacgcggctctggattttgtgcaaaacattgatccagagcggtattggcacgaataaaatcggttaaaagatccccgtcggcaactaagcggtattcaaccaagtaacagcaacttccctcgccccaccacacacacccgcttaaaatccgcgcaaacaatattcattatcatttagcgcatgaaaacttcgttaccggttaaacaaaacacatttgattaaatgcccgctaatgcccgccacataagggctgcagccccaagaaggtgcactatgtgcttattccaccgaataatttcgccataggaattttacttgcccggtgtttagccataaaatcaccgcgattgattgcagtgcgacatatcgtcactgcatcgttactttttcgagctcagagacctttgctctctgttaaggatttccagcatgaccgaagcgacaggactcatggcccacaactggggctttgccattttcctcctcggtgttgtcggcctctgcgccttcatgctcggtgtttccagcctcctcgggtcaaaagcctggggccgcagcaaaaatgaaccgttcgagtccggcatgctgcctacaggtggcgcccgcttgcggctctcagccaaattctatctggtcgcgatgctgttcgtgatcttcgatatcgaagccctctttctctttgcctggtctgtgtccgtccgcgaaagcggctggaccggattcgtcgaagccctcgttttcatagcaattctgttggcaggccttgtctacctattccgagtgggcgcccttgactgggctccggaagctcgtcgtaagcggcaagcgaagctgaaacaatgaggctttggcgatgcaatacaatctcaccaggatcgacccggatgctcctaacgagcagtaccccatcggcgaacgggaaaccgtttccgacccgttagaagaccaagtccacaaaaacatctacatgggcaagctggaagacgtgctgagtggcgcggtcaactgggggcgtaaaaactccctgtggccgtacaacttcggtctttcgtgctgctacgtggaaatgaccaccgccttcacggcgccccacgacatcgcgcgctttggcgccgaagttatccgggcctcgccgcgccaggcggatttcatggttatcgccggtacctgcttcatcaagatggcgccgatcatccagcgtctctacgagcaaatgctcgagccgaagtgggttatctccatgggttcgtgcgccaactccggtggcatgtacgacatctattccgtcgttcaaggggtggacaagttcctgcccgtggacgtctacgtgcctggctgcccgcctcgccctgaagcgttcctgcaaggcttgatgctgttgcaggaatcgatcggcaaggagcgtcgtccgctttcctgggtcgtcggtgatcaaggcgtgtaccgcgccgagatgccgtcgcaaaaggaacagcgccgcgaacagcgaatcgcagtcacaaacctgcgcagccccgacgaagtctgatccagcaccgcttcttttatagaacgaacacctggcttcattctttacgttgaccgaaagcgataaaaaaccatgactacaggcagtgctctgtacatcccgccttataaggcagacgaccaggatgtggtcgtcgaactcaataaccgttttggccctgacgcctttaccgcccaggccacgcgcaccggtatgccggtgctgtgggtggcgcgtgccaagctcgtcgaagtcctgaccttcctgcgcaacctgcccaagccgtacgtcatgctctatgacctgcatggcgtggacgagcgtctgcgcaccaagcgccaggggctgccgagcggcgccgatttcaccgtgttctaccacctgatgtcgctggaacgtaacagcgacgtgatgatcaaggtcgcactaaacgaaagcgacttgagcatcccgaccgtcaccggtatctggccgaacgccagctggtacgagcgcgaagtctgggacatgttcggcatcgacttcccgggccacccgcacctgacgcgcatcatgatgccgccgacctgggaaggtcacccgctgcgcaaggacttcccggcgcgcgctaccgaattcgacccgttcagcctcaacctcgccaagcagcagcttgaagaagaggctgcgcgcttccgtccggaagactggggcatgaagcgctccggcaccaacgaggactacatgttcctcaacctgggcccgaaccacccttcggcccacggtgccttccgtatcatcctgcaactggacggcgaagaaatcgtcgactgcgtgccggacatcggctaccaccaccggggcgccgagaagatggccgagcgccagtcgtggcacagcttcatcccgtacaccgaccgtatcgactacctcggcggcgtgatgaacaacctgccgtacgtgctctcggtcgagaagctggccggtatcaaggtgccggatcgcgtcgacaccatccgcatcatgatggccgagttcttccggatcaccagccacctgctgttcctgggtacctatatccaggacgtcggcgccatgaccccggtgttctttaccttcaccgaccgtcagcgtgcctacaaggtcatcgaagccatcaccggtttccgcctgcacccggcctggtaccgcatcggcggcgtggcccacgacctgccgaatggctgggaacgcctggtcaaggaattcatcgactggatgcccaagcgtctggacgagtaccaaaaggcggcgctggataacagcatcctcaagggtcgtaccatcggcgtcgcgcagtacaacaccaaggaagccctggaatggggcgtcaccggtgccggcctgcgttccaccggctgcgatttcgacctgcgtaaagcgcgcccgtactccggctacgagaacttcgagttcgaagtgccgctggcggccaatggcgatgcctacgaccgctgcatcgtgcgcgtcgaagaaatgcgccagagcctgaagatcatcgagcaatgcatgcgcaacatgccggccggcccgtacaaggcggatcacccgctgaccacgccgccgccgaaagagcgcacgctgcagcacatcgaaaccctgatcacgcacttcctgcaggtttcgtggggtccggtaatgccggccaacgagtccttccagatgatcgaagcgaccaagggtatcaacagttattacctgacgagcgatggcggcaccatgagctaccgcacccggattcgtaccccaagctttgcccacttgcagcagatcccttcggtgatcaaaggcgagatggtcgcggacttgattgcgtacctgggtagtatcgatttcgttatggccgacgtggaccgctaagcatgaacagcacgcttatccagacagaccgtttcaccttgagtgaaaccgagcgctcggccatcgagcacgagctgcatcactacgaagacccgcgcgcggcgtcgatcgaagccttgaagatcgtccagaaagaacgtggctgggtgccggacggcgccctctacgccatcggcgagatcctcggcatccccgccagcgacgttgaaggggtggccacgttctacagccagatcttccgtcagccggtgggccgccacatcattcgcgtgtgcgacagcatggtctgctacatcggcggccacgaatccgtggtcagcgagatccagaacaagctgggcatcggcctcggccagaccactccggacggccgcttcacgctgctgccggtgtgctgcctgggcaactgcgacaaggcgccggcgttgatgatcgacgacgacacattcggtgacgtgcagcctgctggcgtgacccaattgctcgagggctacccatgaccctgacttctttcggcccggccaacctgatcaagcgttcgcccgagacccacccgctgacctggcgcctgcgtgacgatgccgagccggtatggctcgacgaataccaggccaagaacggttacgccgctgcgcgcaaagccttcgccgacatggcccaggacgatatcgtccagaccgtgaaagacgccggcctcaagggccgcggcggtgcaggcttccccacgggcgtgaagtggggcctgatgcccaaggacgaatccatcaacatccgctacctgctgtgcaacgcggatgaaatggagccgaacacctggaaagaccgcatgctgatggagcaactgccccatctgctgatcgaaggcatgctgatcagcgcccgcgcgctgaaaacctaccggggctacatcttcctgcgtggcgaatacaccaccgccgccaagcacctcaaccgtgccgtggaagaagccaaggccgccggcctgttgggcaagaacatcctcggttcgggttttgacttcgaactgttcgtgcacaccggcgccgggcgctacatctgcggtgaagaaaccgcactgatcaactccctcgaaggccgccgcgccaacccgcgctccaagccgcccttccctgccgccgtaggcgtgtggggcaagccgacctgcgtgaacaacgtcgagaccctgtgcaacgtgccggcgatcatcgccgacggcgtggactggtacaaatcgttggcccgcgaaggcagcgaagacatgggcaccaagctcatgggcttctccggcaaggtcaagaacccgggcctgtgggagctgccgttcggcgtgaccgcacgcgagctgttcgaggactacgccggcggcatgcgcgacggctacaccttgaaagcctggcagccaggcggcgccggtaccggtttcctgttgcccgagcacctcgacgcacaaatgtatgccggcggcatcggcaaggtgggcacccggatgggtaccggcctggcgatggcggtcgacaacaccgtgaacatggtgtccttgctgcgcaacatggagcagttctttgcccgcgagtcctgcggcttctgcaccccatgccgcgacggtctgccatggagcgtgaagctgctgatggccctggaaaacggcgaaggccgcgagggtgacatcgagaccctgctgggtctggtcggtttcctcggcccaggcaagaccttctgtgctcacgcaccgggcgccgtggaaccattgggcagcgcaatcaaatacttccgctcggagttcgaagccggcatcgcgcctaccagtgccgccgtcccgcctctggcgaggccgatcgtagtcggcgcgtaacgctttaacaggtgaagggtccgtgcccttcacctgctcatgggctgacgccgtaaaggctgtgttgacgcccatgaataacaagattccattagccacgcccgctgacaacgggccaacgaagaactttgaaccatggccactatccacgtagacggcaaagcgctcgaagtcgatggggcagacaacctgttacaggcatgtctctcactaggcctcgacatcccatatttctgctggcatcccgcgcttggtagcgtcggggcctgtcgccagtgtgcggtcaagcaatacaccgacgagaacgacacccgtggtcgtatcgtcatgtcctgcatgaccccagccaccgacaacacctggatctccatcgacgatgaagaatccaaggcgttccgcgccagcgttgtcgaatggctgatgaccaaccacccccacgactgcccggtctgtgaggaaggcggtcactgccacctgcaagacatgacggtgatgaccggccacaacgagcgccgttatcgcttcaccaagcgtacccaccagaaccaggacctcggcccgttcatttcccacgaaatgaaccgctgcatcgcctgctatcgctgcgtacgcttctacaaggactacgccggcggcaccgacctgggcgtattcggcgcccacgacaacgtgtacttcggtcgcgttgaagacggcgtgctcgaaagcgagttctccggcaacctcaccgaggtctgcccgaccggtgtattcaccgacaagacccactccgagcgctacaaccgcaaatgggacatgcagttcgccccgagcatctgccatggctgctccagcggttgcaacatctccccgggcgagcgctacggcgaactgcgtcgcatcgaaaaccgcttcaacggttcggtcaaccagtacttcctgtgcgaccgtggccgtttcggctatggctacgtcaaccgcgaagaccgcccacgccaaccactgttggccgacggcgccaagctgagcctggacgacgcgctggataaagccgccgacctgctgcgcggccgcaacatcgtcggtatcggctcgccgcgcgccagcctcgaaagcaacttcgcgctgcgcgagctggtcggtgccgagcacttctactccggtatcgaagccgctgagctggagcgcatccgcctggtcctgcaggtgctgaacgacagcccgctgcccgtaccgaacatgcgcgacattgaagaccacgacgcgatcttcgtgctcggtgaagacctgacccagaccgccgcccgcatcgccctgtcgctgcgccagtcggtcaagggcaaggccgaagacatggccgacgccatgcgcgtccagccctggctcgacgccgcggtgaaaaacatcggccagcacgcgctgaacccgttgtttatcgcgagcatcgctgaaacaaagctcgacgacatcgccgaagaatgtgtacacgcagcgccggacgacctggcgcgcctcggtttcgccgtggcccacgccctggacgcaagcgcgcctgccgtcgacggcctggacaccgaagccgtcgaactggcccagcgcattgccgacgccctgctggcggccaaacgcccattgatcattgccggcacctcgctgggttccaaggcgctgatcgaagccgccgccaacatcgccaaggccttgaagctgcgcgacaagaacggttccatcagcctggtggtgccagaggccaacagcctcggcctggccatgctcggtggcgagtccctggacgctgccctgcaagcggtgaccgacggcaaagccgacgccatcgtggtgctggaaaacgacctgtacacccgcaccgatgccgccaaggttgacgctgcactgaacgcggccaaagtgctgatcgtcgccgatcaccagaagaccgccaccagcgaccgtgcccacctggtactgccggccgccaccttcgccgaaggcgacggcaccctggtcagccaggaaggccgcgcccagcgcttcttccaggtgttcgatccgaagtacatggatgccagcatcctggttcacgaaggctggcgttggctgcatgccctgcgcgccaccctgctgaaccagccgatcgactggacccaactcgaccacgtcaccgcagccaccgctgccagcgccccgcaactggcgcggattgtcgacgctgcaccgtccgcctcgttccgcatcaagggcatgaaactggcccgtgaaccgctgcgttactccggtcgtaccgccatgcgcgccgacatcagcgtgcatgaaccgcgtaccccgcaagacaacgacaccgcgttcgccttctccatggaaggttactcgggttcggtcgaaccgcgtcagcaggtgccgttcgcctggtcgccgggctggaactcgccgcaggcctggaacaagttccaggacgaagtcggtggtcacatccgcgctggcgacccgggcacccgcctgatcgaaagcaccggtgatgcgctgaactggttcgccgccgtaccgcgtccgttcaacccggcccagggcacctggcaggtcgtgccgttcttccacttgttcggcagtgaagagaactcctccaaggccgcgccggtgcaaagtcgcattcctgaggcctacgtatccgtggccaagtccgaagccgaccgcctgggcgtcaacgaaggtgccttgctcagcctgaacgtggccggccagaccctgcgtctgccgctgcgcatcaacgacgagttgggtgccgggctggttgcactgcctaaaggcctcgccggtatcccgccggcgatctttggcaaaaccgttgacggtctgcaggaggcagcgcaatgacctggttcacccctgaagtgatcgacgtgatcatctcggtcgtcaaggccatcgtgatcctgttggccgtggtcgtcgcgggcgccctgctcagcttcgtcgaacgtcgcctgctgggctggtggcaggaccgctacggtccgaaccgcgttggcccgttcggcatgttccagatcgccgccgacatgctgaaaatgttcttcaaggaagactggaccccgccgtttgccgacaaggtgatcttcaccctggcaccggtcgtggccatgagcgccttgctgatcgccttcgcgatcatcccgatcaccccgacctggggcgtggcggacctgaacatcggcttgctgttcttcttcgccatggccggtctgtcggtctatgcggtgctgttcgccggctggtcgagcaacaacaagttcgccctgctgggcagcttgcgggcttcggcccagaccgtgtcctacgaagtgttcatgggcctcgcgctgatgggcatcgtggtgcaggtcggctcgttcaacatgcgcgacatcgtcgagtaccaggcgcagaacctgtggttcatcattccgcagttcttcggcttctgtaccttcttcatcgctggcgtggccgtgactcaccgtcacccgttcgaccagccggaagcggaacaggaactggccgacggttaccacatcgaatacgccggcatgaagtggggcatgttcttcgtcggtgaatacatcggcatcatcttgatctcggccctgctggtcacgctgttcttcggcggctggcacggaccgttcggcatcctgccgcagttggcgttcttctggttcttcctgaagaccgcgttcttcatcatgttgtttatcctgctgcgcgcttccattccgcgtccacgatatgaccaggtgatggatttcagctggcgcttctgcctgccgctgaccctgatcaatttgctggtgactgctgccgtggtgctgatgcacgcgccagcggctgcggttcagtgaggatttgacccatgttcaaatatattggcgacatcgttaagggtaccggtacccagttgcgaagcctggtgatggttttcggccatggctttcgcaaacgcgacaccctgcaatacccggaagaagcggtgtacctgccgccgcgctatcgcggccgcatcgtactgacccgcgaccccgacggcgaagagcgttgcgtagcctgcaacctgtgcgccgtggcgtgcccggtgggttgcatctccctgcagaaagctgaaaccgaagacggtcgctggtacccggacttcttccgcatcaacttctcgcgctgcattttctgcggcctctgcgaggaagcttgcccgaccaccgcaatccagctcacgccggatttcgagatggccgagttcaaacgtcaggacctggtgtacgagaaagaagatctgctgatctctggtcccggtaaaaaccctgattacaacttctatcgtgttgcaggtatggccgttgccggtaagccgaaaggcgccgcacaaaacgaagccgagccgatcaacgtgaagagcttgctgccttaaggaagaaagatggaattcgctttctatttcgcatcgggtatcgcggttgtgtccacgcttcgcgtgatcaccaacaccaaccctgtgcacgccctgctctacctgatcatttcgctgatcgccgtggccatgaccttcttcagcctcggcgcgccgttcgccggtgtactggaagtgatcgcctacgccggcgccatcatggtgctgttcgtgtttgtggtgatgatgctcaacctggggccggcttcggtcgcccaggaacgcgtctggctcaagcccggcatctggctcggcccggttgtcctggcagcgctgctgctgggtgaactgctgtatgtgctgttcgctcaccagagcggccaggccatcggccacaccaccgtggatgcaaaagccgtgggcatcagcctgttcggcccgtacctgctggtggtcgaactggcgtcgatgctgctgctcgctgcagccgtcaccgccttccacttgggccgcaacgaagccaaggagcaatgacgatgcctgctatccctttggagcatggtctggcggtcgccggcatcctgttctgccttggcctggtcggcctgatggtccgccgtaacattctgttcgtgttgatgagcctggaaatcatgatgaacgccgcggcactggcgttcatcgttgcgggtgcacgttggggccagccagatggacaagtgatgttcatcctggtgatcagcctggcagccgccgaggccagtattggcctggcgatcctgctgcaactgtatcgtcgcttccacacgcttgatatcgacgctgccagtgagatgcgcggatgaacatgatctttctgactttcgtattccccctgatcggtttcctgctgctgtcgttctcccgtggacgctggtcggaaaacctctcggccctggtgggcgtgggttccattggcctgtcggcgatcgtcgccgcctacgtcatctggcaattcaacgtggcgccgccggaaggcggtcactacaccctggtgctgtggcagtggatgtcggtggagggcttcaagcccaacttcgccctctacgtcgacggcctgtcgatcaccatgctcggcgtggtcgtcggcgtgggcttcctgatccacctgttcgcgtcctggtacatgcgcggtgaagccggctactcgcgcttcttctcgtacaccaacctgtttatcgccagcatgctgttcctggtgctcggcgataacctgttgttcctgtacttcggctgggaaggcgtgggcctgtgctcgtacctgttgatcggtttctactacagcaaccgcaacaacggtaacgcagccctcaaggcgtttatcgtcacccgcatcggcgacgtgttcatggccatcggcctgttcatcctgttccagcaagtgggcacgctgaacatccaggaactgctggtgctggcaccgcagaaattccaggtcggtgacttctggatcaccctggctaccctgatgctgctgggcggcgccgtgggtaaatccgcgcaactgccactgcaaacctggctggcagacgcgatggctggccctaccccggtttccgcactgatccacgcggccaccatggtcaccgccggtgtctacctgatcgcccgtacccacggcctgttcaccctggcgccggacatcctgcatctggtcggcatcgtgggtggcgtgaccctggtcctggccggcttcgctgccctggtgcagaccgacatcaagcgcatcctcgcctactcgaccatgagccagatcggctacatgttcctggccctgggcgttggcgcctgggacgcggcgatcttccacctgatgacccacgccttcttcaaggccctgctgttcctcgcgtccggtgcggtgatcgttgcctgccaccacgagcagaacatcttcaagatgggcggcctgtggaagaaactgccactggcctacgccagcttcatcgtcggtggtgccgccctggccgccctgccgctggtgaccgccggtttctactcgaaggacgaaatcctctgggaagccttcgccagcggtaaccagaacctgctgtacgcaggcctggtgggtgcgttcatgacctcgctgtacaccttccgcctgatcttcatcaccttccacggtgaagccaagactgaagctcacgcaggtcacggcatctcgcactggttgccattgtcggtactgatcatcctgtcgaccttcgtcggcgccatgatcactccgccgctgcacggtgttctgccgcaaagcgtcgggcatgccggcggcgcagcccagcacagcctggaaatcgcctcgggtgccatcgccatcgccggtatcctgctggcggccctgctgttcctcggcaagcgtcgcttcgtgacagccgtcgccaacagtggcattggccgcttcctgtcggcctggtggttcgctgcctggggcttcgactggatctacgacaaactgttcgtcaagccttacctcgccatcagccacatgctgcgcaaggacccgctcgaccagaccatcggtctgatcccgcgtgccgccaaggccggtcacaccgccctgagccgcagcgagaccgggcaactgcgttggtatgcagcctccatggctgccggtgctgtgctggtgatcggcgccatcgttgtggtagcggtctgactatgaatattgcgaacctgcgaaaggaaacgagcctgtcatgattctgccctggctaatcctgatcccctttatcggcggcctgctctgctggatgggtgaacgcttcggcgccaccctcccccgctggattgcgttgctgaccatgtccctggaactcgcgctcggcctctggctgtgggcccatggcgactattcatttgctccggcaccgggtgtcgatcccaccttcgcgcttgaattcaagcacgtgtggatccagcgcttcggcatcaacgtgcacctggccctcgacggcctgtcgctgttgatgatcctgctgaccggcctgctgggtatcctctcggtactctgctcctggaaagagatccagcgtcacgtgggcttcttccacctgaacctgatgtggatcctgggcggtgtcgtcggcgtgttcctcgccctcgacctgttcatgttcttcttcttctgggaaatgatgctggtgccgatgtacttcctcatcgcgctctggggtcacagttcttcggacggcaagaaaacccggatctacgcggcgaccaagttcttcatcttcacccaggcttccggcctgatcatgttggtggcgatcctggggctggtgctggtcaacttcaacaacaccggcgtgattaccttcaactacgccgacctgttgaagaccaagatgtccctgaccaccgagtacatcctgatgctgggcttcttcatcgccttcgcggtgaagctgccggtggtgccgttccactcctggctgcccgacgctcacgcccaggcgccgaccgccggctccgtggacctggccggtatcctgctgaagacggcggcctacggcctgctgcgtttcgccctgccgctgttcccgaatgcctcggccgagttcgcgccgatcgccatgaccctgggtctgatcgggatcttctacggtgcgttcctggccttcgcccaaaccgacatcaagcgtctgattgccttctcgtccgtttcccacatgggcttcgtactgatcggcatctactccggcagccaactggcgctgcaaggcgcggtgatccagatgttggcccacggtgtctcagccgcggcactgtttatcctgagtggccagctgtacgagcgcctgcacacccgtgacatgcgtgaaatgggtggcgtatggtcgcgcatcgcctacctgccggcgatcagcctgttcttcgccgccgcgtccctgggcttgccgggcaccggcaacttcatcggcgagttcctgatcctgatgggtgccttcgtgcaaacgccgtggatcagtgcgattgctacctccggcctggtgttcggttcggtctactcgctgatcatgatccaccgcgcctacttcggcccggccaagtccgacaccgtcctgcaagggatggacgctcgcgaactgatcatggtgctcggcctggcggtactgctgatctacatcggcgtgtacccgcaaccgttcctggacacttctgccgcaacgatgcatggcgtgcagcagtggttcggcaccgccttctctcaactcgcttcggcccggtaagagcgctatggaattcacgatccaacactttatcgcgcttgcgccgctgctgatcaccagcctcaccatcgtggtggtgatgctggcgatcgcctggcgccgcaatcactcgcaaacgttcctgctgtcctgtgccggcctgaacctggccctgctgtcgatcatcccggccctcaaggtcgcgccactggcggtcacgccattgatgatggtcgatgacttcgcgctgctgtacatcgcgctgatcctggtcgcgaccctggcctgcgtcaccctcgcccacgcctacatgggcgaaggcggcaccggttacccaggcaacaaggaagagctgtacctgctgatcctgctggctgcggccggtggcatcgtgctggtcagcgcacagcacctggccggcttgttcatcggcctggaactgctgtcgatcccgacctatggcctggtggcctatgccttcttcaacaagcgctccctggaagccggcatcaagtacatggtgttgtcggccgccggttccgcgttcctgttgttcggtatggccctgctctacgccgaagccggcagcctgagcttcaccggtatcggccacgccctggccaccaccagcctgcctgcgccaatcgcccaactgggcctggccatgatgctgatcggcctggcgttcaagctgtcgctggtgccgttccacctgtggaccccggacgtgtacgaaggcgccccggcgccggtggctgcgttcctggcgaccgcgtcgaaggttgcggtgtttgcggtgatggtgcgtctgttccagatctcgcctgctgccaacactggcgtgctgagcaacgtgctgaccgtgatcgccatcgcgtcgatcctgttcggtaacctgctggcgctgacccagaacaacctcaagcgtctgctgggttactcctccatcgcccacttcggctacctgctgatcgccctggtggcgagcaaaggcctggccgtggaagccatgggcgtgtacctggtcacctacgtgatcaccagcctcggcgcgttcggcgtgatcacgctgatgtcctcgccgttcaaaggccgtgacgccgacgccctgtacgagtaccgcggcctgttctggcgccgtccgtacctgaccgccgtactcaccgtgatgatgctgtccctggccggtatcccgctgactgccggcttcatcggcaagttctacatcgtcgcgaccggtgttgaagcacacgagtggtggttggttgcctccctggtactgggcagcgccatcggcgtgttctactacctgcgcgtgatggtcaccctgtacctgatcgagccgaacctgcgccgtgtggatgccgagctgcattgggaacagaaggcaggcggcgtgatgctgctggccatcgccctgctcgcgttcttcctgggcgtgtacccacaaccgttgctgaccctggtgcagcacgcggtattgggcgtttgatcgcttagcgagatgcagtcaacagaacggcgccttcgggcgccgttttgcgtttcaggggcaggggtttttaccctcccctattcacggaaatttcctcacccgcctgcctccccttccggcatctacccgatgaaggccgccgtatggtgtctgcgttttaggaaagttcccacattagggtcacttgaccctttgcgagtgggccaccaaactctacgtaggctacgtacagaacatggatgctctatttatcgaactgccggccttcgagcggcatcgcaaggactatctgagtgacgagcttttccagggttttcaacaagagttgatgaagaacccggaagcaggagatgtgatcgagggaacaggcggactgcgcaaagttcgcttcatcgatgagcgacgcaacaaaggcaagcgcggtggcctgcgggtcatttactactggtggtcgggcggcacgcaattctggctgttcaccctgtacggcaagcacgaacaggatgacctgacaccacagcacaaaaaagccctaaaacacatgctggacagggaaatcaaagcgagaacacatcatgaaacgtgaaatcttttccgaactggtcgaaggcttcgacgccctggcagacgaacgccaaggcaaagtcaccctgcgaacccataaggttcatctcaatcaactggagccgcttaccgccgaggaggtggtggccgtgcgccagcaactcaacctctcccggtcggtgttcgccatgtacctgcgcaccaacacccgtaccctggaaaactgggaacaaggtcgggccaagccaaatgcccaggctgccacgctgattcgcctggtggcacgttttcctgagaccgtggcgcaacttgccgctttgggttgatctgcaattacctcaaaaaaaacgccccggacattgggggcgtttttcggtgcatcgcgtcagaaagcgataccgaccttgaagccgtactcgttacgcttgagcttggtgttgtcagccacttcggagtcaccgtcgagcttgtactcggtgcgggtgtagtacaggcccgcgactaccggcaggtcacccttctgattcatcagcaagctgacttcggcgtaggggttggtgcggtccttgaggtcgacggtgtcgctgccgaaatcatccaccttgagcttggtgcggccatcaatggtacgacgggcaccggcttcgacacgcagggtcatgtcatcgaactggtggttgtagcccagagccgccttggcgaacggcgatttgttggtgagcttcacatcgaggtcgttgatctctggctcgtagcgggtccagctgtagccgccaccgacgatcacgtcgacaaaattgcgcgcatccagcgcggcacgccagccgagatccaggtcagcctggccttccttgagtttgttgtcgctcttttcaccgtacttggcttcgataccggcctggtagataaagccggattcggcggtgagcttgttgccgaagttgtagaacaggccggcctcaggcatgtggctcttgtcgctctcgctgccgccttcgaatttgaagtcgttgtagctgcccaggatcccgaaggtggaaatcgggtcggtggacggtgcggcgaacaccacggcaggcgcagcgaccagcgccagcagtgaggaacccttgaggaattttccgaatagcttggacatcgttttacatctccttgtctggtgagcaaattattcaggaaccgcttcgaaccccggcgcgtgccaaaggttcgaattaatttgcgttgatttggaggtaaaacggttcagcgaaggctctttctcgctattcctgggcagcagcctggaccaagccatcaagggtttgccgaagcgttgccgtatccggcacgcgaatcccgaaggtttcagtcagcacctgcaccacctcatcggcactgccaagcgagcgttttacgctcggccggtccagggagtggatcgcatagtgggcattgttcagggtatggcgcttgcccggcgccaggcgcgcgactttcagttggccgacgaataccgatttcgggtgggtggagacgtaccagttaccgatttcataatcgatatccgcctgtacttgcaggtcgaacacatacaggccgcgccactcctcggccacttgtgcccacaaggtgtaacttccctgcccgtcgaaagtcaggcgatacggttcatgggccgtggcctgcaccgcttcggtgtccagttgcaacgggctgctgggcaccatgccgccaaagccgacatcggtgatgtagcgcacgccgtccagagtcaccaggctcaagcgatgggtacgcgccgtgcgcgcatccggcggcccgcccatcaccacccggccggtgatgccacgcgcctcgaagccgagttcctgcagcaacgccaggaacatctggttcagctcatagcaatagccgccccgcccgtccaccagcactttttgttcaacactgggcaggtcgatcggcaccggcaggcgtatcaggctcgacaggttctcgaaggcaaagctgcacacatggcgcagttgcaggtcctgcaaggtttgcagggtgggcgccggcggcgtgtcataacccaggcgttgcaggtagaggcggctatgggtcagcagaggcatggcacgatccttgggcgcaggaagaaagcgtcactatgccgcgcccgcatgcagattgtcattttgaatgaacctttttgaacgctgccctatccatctataacaacacagggaggcaacatgagtaccgcaaaaatctacacgatcaattatcagctgcacggtcaaccgaaaacctttgtggtgcgtgccgaagtaatgaacaacgccgaggcctggcactgggcggcggtggatgccgatattgcccatgtgagtcgcgtgggacgcgtggggcatgagcaggtcaagaaaaccacccggccctgggcggagaagtttgggattacggatgtcacgtggatcgcacccaagtaagtgaacagcctcaccttgcaaggtggggcttccaacaccctttgcagttgaccgtttgcccatcatgagcagagctaacgcttcagtgaaatcaattcaattttactcgacctgtgccccgcctaaactacatcctaattattgatactcgaaatcaatctggcacctgaacaacccatcaggtgtgtcccagaaatcaggatgtcaggtcaccatgaacagcgagtttgaattcactcttaaaacccagcgtttcgacgaacattatcacccctcggaaaacacgcgcatcaccactaactttgccaacttggccaggggcaaaagtcgccaggagaatctgcgcaacacactgaggatgatcaacaatcgtttcaatgcattggcgcaatgggataaccccaagggtgatcgctaccgagtggaacttgatatcgtctctgttgaaatgaacattgactctgaacagcgtggcaacgccatcccgctgattgaaatattgaaaacaacgattgtcgatcaacacaccgatgaacgcatcgagggtattgtcggcaacaacttctcctcctacgtgcgcgactacgacttcagcgttgccttgtcagcgcacaaccagaatcagaccgagttcagcacacccgagaactttggcgacttgcatggaaaactgttcaagcacttcgtcaactcaaacacgtacaaagaaaacttcaaaaaaccgccggtgatctgcctgagcgtttcaaacaccaggacctatcatcgcaccgaaaaccagcatcctgtactgggttttgaataccaacaggacgcctactccctgacggatgactacttcaataaaatgggattgaaggttcgctacttcatgccttcaaacagtgttgcgccgctggcgttttatttttccggtgatttgctggcggattacagcaacctggaactcatcagcaccatcagcaccatggacactttccagaagatttaccggcccgagatttacaatgccaattctgcagccggcaaatcctaccaacccagcttgaagcaccaggattattcactgacgctgattgtctacgatcgagaagaacgcagccgcctggccattgaacagggaaagtttgtggaagagcacttcatcaaaccctaccaggctgttcttcaacagtggtccgcccactgcgcgctttgacgctttaatactacaaggtcatccctgatgaaaaagttgttacctacttcaaccgccggcagtttgcctaaaccttcctggctggctcaacctgaaacactgtggtcgccatggaaactgcaagatgaggcattgaccgagggcaaacacgacgccttgcgtttgtccctgcaggaacaacaacacgcgggcattgatatcgtcagcgacggcgaacagacgcgccaacactttgtgacgacgtttattgagcacctcagcggtgttgatttcgagaaacgcgagaccgtgcgcatccgtgatcgttatgacgcgagcgtgccaacggtcgtaggggctgtttcccgccagaagccggtgtttgttgaagacgccaagttcttgcgccagcaaaccaagcaacccatcaagtgggcgctgcctggccccatgacgatgatcgatacgctgtacgacaaccattacaagagtcgtgaaaagctcgcctgggaattcgccaaaatcctcaaccaggaagcccttgaactagaagccgccggggtggacatcatccaattcgatgagccggccttcaacgtgttctttgatgaggtgaacgactggggcgtggccaccctggaaagggccattgaaggcctcaaatgtgaaaccgccgtgcatatctgctacggctacggcatcaaagccaataccgactggaaaaagacgctgggatcagagtggcgtcaatatgaagaagccttccccaagctgcagcaatccagtatcgatatcgtctcgctggagtgtcacaactcccatgtgcccatggagctgattgaacttatccgcggcaaaaaagtgatggtcggggccattgacgtggccagccacacgattgaaacgccggaagaagtcgccaacaccctgcgcaaagcattgcagtttgtcgatgccgacaagctctacccttgcacgaactgtggcatggcgccgctgcctcggcacattgccaggggcaagctgaatgcgttgagtgccggcgcagccattgtccgaaacgaactctcgaacccgtagtaagaatgcgcaaggcctgacgatttcaggccttgcctggcgcattcgcacgccccccaattcaggaccgcctatgtcacctcccatcgagcccttgcgctttcgagaagccctcgggcactacgcgtccggtatcacggtgattacctcccacgttgatggcgagccggtcggcttcacttgccagtcgttctacagcgtgtcgatgagcccgccgctggtgtcattcagcgtcatgtccaattcggccagctatcccaggattcgccaggccggccggttcgccgtcaatatcctgtccggcgatcaagtcaggatttccaaccagttcgctcggcgaggcacagacaagtggcacggcgtggagtggcagggatcaccactgggcaacccgctcattgccggcagcctgcactggctggattgcgaaattcacgccgaacacgccgcaggtgatcacctgatcgtgatcggcgaagtgaaagccttgaacctgcatgaagcgactgcttcacagccattactgtatttcaaagggcagtatcgcgacctcgccacgcacgatgcgtgtcggcaagaatgagccgcgagcactgtggccggatcaagtcttcaaatctcccagcggatcgtaaggcggtttgcgctcgtccttgtcggtgtttttctgatccaatggcgcgatagccgggccaatggggtccacctgcggatccgatacatccggtgaatccggatcaaaccccagttcatcctgaccactggaatgctcacccgaagccgggcctttcgctgtgtcactcacggcgttctcctcatttaaagtgggcgagccttgtcatgcaggctttcaaggtcttcctcgacgcgttcaacgtcgtcgtcctgacgctccgccgggtcgttggggcgtaacgcatcgttgtcgcgttcctcctctccgggtgtgcggtcagggttgggggtgccaggcggtggttgcttgtattcgggcatgatggctcacctcaaagggtcttcatcaatttagagaaaccgccgtgcagcatcgttcaacttgtttgcccaagcgtgagatgatgccggccccttctggagagatgacccggatgttcgagctcaaaccctgcgaccctgtcaccttccgtcaacagacccggcgcagcacgctgatcgtggccgtgttgttcgtcgcactggcgatgctgctgtcgagcctggcggtgatgctgtttggtgcgcccggcggtgacaatttccgcttcaatgtcggcggggtgttcgccggggtgctgatcaccctggccctggtgcgtggcccgttctggacccaggcgtggctgacgccggcggtgtatggctggcagctcaagcgcagcctgatgagcgtgaccaatgtgatgcacaaggtcaccgagcgggtgcaggccaatgacccgacggcaatcaaggtgctgcgcttctaccacttgggcttgacgcagatgcatgaactggatgccaactccagcgcccaggtgcagttgctggctgaggtggaggcgcacaaggccaggatgcaggcgctggggatcgacaccgaacaaacccgtctcgaccccgcctggctggcagcctttaaaaccgcttaagccagcatgccgatgcgctgctcgtcgggccagaacagcgccgcctggccgcacggctggccggcgtcatcgagcaaggtccacaccaccccagcatgaatcatgaacggctggttgtgcgcatccacccgccaaccgctgtaaccctcggcgatgccgtgggcggtgacttgctccagcagaagctggcgcgcggcgcgatcgagggccgaggcgctgaagcgtgagggcatgccgataaagctctcgcgcgggtatttgaagcactgcaaggcgcagtcattcacatacgtaaatcgcggatctgcgccgccatcatgggccagcaggctgtagggcgcgtcgctgtgcagccaggccaggcgctgttgcgcgtccaggtgtgccggggccggcagtccctggccagtccagtgtcgataggccttatccagcacgcctacgaaggtttcttgagaggacacgtacaacctcacatcatcagttggaattttttgcccgccagcagaacaccgcgctcacggcgatggctgcaccggccaggccaaacacccacggcgccgaagcgatcggcaacagcaggccggcgagcaaggggccaaggccggcgccgatatcgcgccacacggcattcgaggccaaggccgatacccgcatcgacccggggttgcgctccgctaccagggtggtcaccagcggcagttgcaacgcacgcaacaccagcaccgccgccgcgccgacaatcacccagtaactaccgaacgccgtcagggccagggcactcaggaacgaaaacagcagcagcatcgaggtggcgccaaaacgctgggccgcgcgaccgcccaacgggctcaggagcatttccgagacataacgcagcgccatcaggccgccggcaatcagcaccgcatccccgcccagcagcttctgcgcctggatcgacaggccgaagataaacagcccgtccagcgctacgccctcgataaacgaccacaccgccacactgtccggccatttgaagcgtcggcccggggtgctgtgcaaatcatgcccgaccgtaggtaagccgcgcgccatccacaagcccaccaggcaacacccggccagaatcagaaagatcggacgcggcccggcccacagcgtcagccagccgcccaggggcagcgccagcatcggccccagggcgatcaacgcccgcgagcgtccggcgcggcgtgcggcaccggcgggctccgaggtggccagcacttgggtcgacaggttcaatgcggcaaaacacaggccccacaccaggcgcaggcagagcaatgcggcaaacccggacaacatcgagttgcccaccgcacacaaggtcgcggcgccggcggcgatcatgcaggtcaggcggtcgccgttgcgtgcgtagaaattgagcacatgccggtagccgaaaatccgcaccaggcggttggcggccagcaacaccccggcctgggccagggtgataccgaacgcctgggattccatgggcagcagcaggtagagcaacacgtcactgggcaggcataaagccagggtcaaagcggcgcggcgggaatgagtatcagcggtgcggagggccaggctggacataaatctgaaacatcccgaaatattcaggtcgccacggtagcgttaatcagacctttttcccatagggcaacaaacgcagaccactggccaccgcgcccaccagtgcaaacccgcagcccagccacagcgcatagtgcgggccactgcccacggacaagtgaaaacacagggccaccagcgaagcacccagcgtctggcccaacaggcgtgaaatcgccacgatgccgctcgccccaccgctgcgggccaagggcgcgctggtcatcaacgccttgaggttgggtgactggaaaaacccgaacccggccccgcacagcgccatgcgccagccgatatcaaatgccgaggcgccgctgcccagggtggccaacgcagccatccccacgctgagcatcaacaagccgatgccgcacagcacacccagggacacacggtccgccagacgccccgcgaccagcgccatcaccgccaccaccgccggccatggcgtcatcaggaaaccggtttccacctggctgtggccgagcaccgcctgcaacaaaaacggcagtgacacaaaggccaggccctgggcgctgaaggcactcacagcagtcaaggaagacaaggcaaacaccgggcgcttgaacaggtcgagcgccagcatcggtgccgggtgcccggcctggcgccgcaacagcagcacaccgcagaccagtgccacggcaatcaggcccagcgtcagcgcaccctgggcaccgtgcaccgccgtgcccaggcccagcaccagcagggcgaacagcccggcgcacaacacggcggcaagccgatcgaaggcatgccccgtcatcggcagggtcggcaacgagcgcaagcccagccccaaggccaataaccccagtggcacgttgatcagatacaaccaatgccaggtcgccaccgacagaatcgccgacgcagccgtcggcccaagggtaaaggccaaccccaccaccaacgagttatagcccagcccgcgcccgagcatttttgacgggtagatatgccgcagcaacgccgtgttcacgctcatgatcgccgccgcacccagcccctgtgccacccgcgcagcggtcagggtgaccagcgatccggccaacccacaaaacagcgacgacacaataaacagcagcaaaccgccgaggtacacccggcgatgccccagcacatcactgagcgacgcaaacggcagcaccgtggcgataatcgccaactggtaggcattgaccacccagatcaccgaggcggaatcggtaccgatcccctcggccagggtcggcaatgccgtgttgacgatggccgtgtccagggtcgccatgccgattcccagggagatcgcgatcacggccggcaggcgtttattgaggggcaacccatcggcaacagaagacatgaacaatccgcccaggtgactaaggcggttagattaatggcagcggcgaatttattcagtggtggataggctacctgtcagtattttcatgttcgcgcccattgaaagagacctcctacattgtcccgctgcaatttttgcgagggtgacgttcctctgcccttacgagaaactcactgatggacaacgatcgtaaaaccgcgcattgcgatgcacgccggcattttctgcgcctggcggccaccagcgccggggctgtgcttctggcaggtcagttgccaatcgcctcggctcacgtggccgacacgccaaccagcattatcgacccgcagcaggcgttggcgcgattgatggagggtaacagccgctacgccgccgacgtgacaaagcgccgcgacctgatggtggagcgcgaggccttggtcagcggccagcatccgttcgcggcagtactcgcttgcgccgactcaaggattgcgcccgaatacatcttcgataccggcctgggcgaactgttttgcgtacgcgtagccggcaacttcgtgacggaaaacgggctcgccagcctcgaatacgccgttgcgatgctggggacgccattgatcctggtgttggggcatgacagctgcggcgccatttcggctggggtcaaggcggtcaaagacaacgtgaccttccccggtaaaatccagagcctggcggatgcgatcaagccttccgtgaacaaagtgctgaaagcgcccggcaacctgctcgacaacgccattgcgcaaaatgtccgggacaccgtggcacggctcaagggcgaatcaagcgtgctggccgacgcccttgcccaaggaaaactcagcattgtcggcggcacttaccgactgcgcagtggcaacgtggagttcctggcgtgatcaggtgcgccagtgcccagtcttcgccatcacccctaccgcctcggcaaaacccgcctggggcagcgtgttgagcgtgaccagccccacgcagcgtgtcggtttcagggtcgccgtgtgcgtcgccacgcgtgcgccctgctccacaccggccagcaccgcctcagggatatgcagcgcgttcatcagttccagcacatcctggccgagcgtggcgtcatcggcctcgcgcaggtacggcacgatcacccggaaaccttgcgccgccagcggcccgctgaccgccgcaaacacgctcacatccgccgccaacaagataatcgcgcggccctcctccggcccgaactgctcataacggacctccccttcatccgtgctcacctgttgcagcgcaaacgcaggggcggcgatcaccaccgacgccagcagtagaaaaccacgccgatcaaacatcactcacccccacgatcaattcactgcccagccaagcggccaggtattcacccgcctgcatgacgccggcctcttcccccaggcgctgcaccagcaattcacacagcccggcgaaactgccgtcagcctgtacgtgctgcaccgcctgaagctccagcgcatccatctgacgcagccgcgaggtgaattgccgccgccacaccagcaaaccgcccgcctgctccagcatcatcgcttgcggcgcgggcgtttcctgccacagcgccgaccagatggcctcggcattggtggtcaagtcgtggcaacgcaacgacggtgtgagctgcactaccgcggtgtcccagtccagctcggccagcgcttccagggccagcggttgcgcgtcagcggcgacaaaggcttcattcagggccgactcgatccacgccaactcatgcacatccggattgcgcgggaacacctccttcaaggtggtgtagaacccctcggggtacgcgtccagggtccaggcatggggcggatggttgtcgatgtgcgtaatgctcgcggccaggaacgcttcctctccaagccaacggcgcagggtggggaaagcctgttcgaggcagcccaccaactgggcgcggtagttgttctggtacaccgccagaccggtgtgattgctgcccagcaactctgcggattcatccgacgcggtcaccagccagctacgaaaagcctgctgaagttgcgccaggttcatcgcgctgcccccaacgtccgggccatcgacagttcctgaagcagctcggcgagcggcgggatctcatcatcgcgctcgatcatggtcgccaccggccccagccgggtcatggcctgggcgtacagttcccagacgccggtgcacaccgggctgtcatggctgtcgatcaagatgtcacggccctggctgtggccagccaggtgcacctggcgtactcgctcggcggggatgccgtcgagaaacgccagggcgtcgaaaccgtgattgctcgcactgacgaacacattgttgacgtccagcagcagctcacagccagtgcgccgggccatggccgtgatgaactcccactcggtcatggcggcaccctcgaacgccaggtaactcgacggattttcgaacagcatcgtacggcccagcacgtcctgggcctgatggatattggcgcagacccggtccagcgcttcgtcggtatagggcaccggcaataagtcatgggcattgaaaccgccactgcgcgaccagctcaggtggtcggagacaaacagcggttcaatttcatccaccagcgacttgaggcgccgcaggtaatcggtgtccagcccttcggcggtgccgatggacatggacacgccatgcagtgccaccgggtagcgctcgcgcacctggcgcaggatgtgccggggctggccgcccgcgaccatgaagttttcggagatcacttcgacaaaatccacgggcaccgaagtctccaggaagtcgcagtaatgctccttgcgcagccccaggccgtagcctgaaaagtgagggttggatgtcgacatgacggatctccgcaacgaataagtggcgagcccacacagggcccgccgggtggattacttcggttcggtcaaggtgccaccggccttgaggcactcggacggggtcttgacgatcacgccttcgcccttgcagctgttgagacccttacagtcgttcttggcggtggcacacaggctggtgcctttacaggtgttgacgccgtagcagcgcccgggtttttcctgttggtcggcggcgctggcggcgctgacgaatgaggccgaggccatggcaataagggcggcagcggcagcgaggctcaggcgggatttgagtgcagtgttcatgggtgtttctccagggttggggtgaattacttgataacggaagcagcgtcttcgatgaccttcgccacagcctcgggctgggagatgtacaccgagtggctggccttgatttcggtgaccttggaaccggcacgcttgtacatccagcgctgcaggtcggggctcagggcacggtcttcggtggagaccaccgcgtaggtcggctttttgtgccaggccgcggcccacacggtgccgccgaacagggcagtggtcgcgggcacctgggaggcggccatgaagtcggtgcggttggtggtcaggtcggcggcaaagtcggcgttgaacctggcacggtcgaagaacaggtgaccgtcgcggctctgcttgatgtcatcgctgggcgccggcatggagccgatcaactgggccatgttctcgcccacttccggttgcagcgccgacacgtagaccagcgacttgaccttgtcgcggtcgccggcaatcgagatcaccccgccaccggaactgtgacccaccagcaccaccgggccgacttgctgctccagcacttcgcgcgcctcggccacgtcggcggccaggttctcgtggccctggtgcaccaccgtgaccttgtagcccttgtgaatcaggatgtcgtgcaccacacgccagccggagccgtcgacaaacgaacctggcacgatcaccacgcttttaccggtgccgggctgcggggcatcagcggcctgggccagcatcggaacggtcagggccatggcaatggccagggaagaaagcatacgcattggaaatctccatcaaagttaagaacgtttgcccaggatcaggcggtccagcgaccaggccccaccgccatacgccagcagcggcaacagcaggcccgcccaggtcaggtgcaccggccaggcatcggggtacacaaacacctcgatcaccagagtcatgcccagcagcgcggaggcggccggacgggtcagcaggcccagcaccagcaacagcgggaacaggtgctcggcgtaggtcgccaggtgcgccgcccactccggcggaatcagcggcaaggcgtactccgagcggaacagcgtgtaggtcgacggcttgagttcaagaaacccggtgaccttggtgcgccccgacagaaagaacaccgccgcgatccccacccgggccaccagcaacagcagggcttcgggcagcaggcgctggatcacggctgctccgtgaggctgccgaagcctttaggggtcttgatctgggtgcaggtgcctttgtccaccagcacccaggcattgccctggtagtcggtggtggcggtgccagcacacgaggtgcctttgccggcggcgcagtcgttggcaccggcgagggacacgccaaagcatttttcctggggcttgggctcgtcggcgtgggccacggccgcgaaggcactgagggacagcgcaagggttgccgcgagggctgcgtaaggacgcttcataagatgagtctcctggcttgactgagtgtggccagggcgccttggaggtcggtgaccgcctgcgccagctggtgagcagagttaaagccaggcgtgtatccgctctgtgtcgcgaacgcgatagaacgtcatgcgggtgtatcagaatggtgcagggatacagttcgatacacagtcaataaaacagtgccaaaactccggcgctgtattcggcatcccgaacgacacaattagaaatattcgcctttccgaacgaaggctttttcgtgtcctcgacgaccacaaaaatcaccataaatttcatgcggttgttgtcatgtttgttacatgccaactggcatacattctgctttatccgtatttctggtaataaaatgtttcagccctgagacagtctcatcccctgaagcactacctgagacacaccataaaaacgaccacgccccaaaggagggcggcctctccgaccttttgatcgacatcaactttccaagactgctgctgcacatctgtaccccaaaaagggcgaacggcctgaacgccgataacaagcccgactataaaaaggacgatttgatgagctcgagcaagaaccacgcagtgtccttcctggatgcagaccaccccgcgccggctacccccgacagcaccctgggctttggcccctttctattactggccaagcaacatgtgttgttgcgcaacggcgaaccggtcaccctgggcagtcgcgcgctctacctgttgattgccctggtgacccgtgcgggggaactgctggagaaagccgaactgatcgccttcgcctggcccaaggtggtggtggaagaatgcaacctgcgcgcacagatcgtcgcactgcgccgggccctgggtgacgatggcaatttcagttatatcgtcaccgtgccgggccgcggctatcgttttgtcgcccccgtcaccgtactggcagccgctaaagagcacctgcccgtgccctatgtgcgaatggacgaacccaacccgccgacgccgacggcggaggtgatcggccgtgacgccttgatcgccagcctggcggaccaggtcatgagccagcgcttcgtcaccctcaccggccccggcggtatcggcaagaccaccgtggccatggccgtggcgcagcgcctggccggtgaactcaacctgggcacgtgctttgtcgacctggccccagccaccagcggccaatgggtggccggcatgctcgccagcgcattgggtatccagaccgtcagcgcagacccactgcactgtgtggtcgccagcctggccaaccgccgcttgctgctggtgctcgacaattgcgaacacgtactgccggccaccgccgacgcggtggaaaccctgctgcgcggcgccccgcaatgctgtgtgctgaccaccagccgcgaaccgctgcgtgcaaacggtgaacgggtgcacgacctggcgccgctggaggtgcccgacgcacacgcccacctcagcgcccagcaagccctggcctggtccggcgtgcgtctgtttgtggaacgcgtccgcgccctcgacccgagttttgtgttccacgacgccgacgtcgcggccgtcagtgcgatctgccgcaaactcgacagcaacgcgctggcgatcgaaatcgccgccgctcgtgtgcgcacctttggcgtccaggacctggtgggcctgctcgacggcagtttccgcctgcaaatgaccggccggcgtaccgccctcgcccggcaccgttccctgagcgcgaccctggactggacctacgccatgctcagtgacgacgaacaggccatgctgcgccagctcgcggtgttcaccggttccttcaccctggaggccgtcaaggcgatgactaccagcagccgcctggccccgcgcaacgccctgcccttgctcgaaagcctgatggacaagtcgctgctgatcgccagcgaatccaccgtgcccaagcgctaccgcctgctggaaaccacccgcgcctacgccttggaaaaactcaacgaacagggcgaaacccgcgccacctgccaacgtcacgcgcgctatgccctcggtatgttgcgcgaagccgggcgaaccctggatggcctgtcgccgggcacctggcttgccctctacgctgcggagatcaacaccattcgggccgccctcgaatgggcttactcgcccaccggcgacctgcccctgggcatcgagttgaccttgggcggcgtgccgttgtggctacgggtgtcgctggtcagcgagtgccgcagttgggtcgatagaggcctggccagcgacgccctcgtcccgctgcccttgcgccagcgcatgttgttgcagaccgccctggccagtgtgctgatgctcacctacggcaccggcggcccgatgcgcgaagcctggcgccaggtgtgcgaagacgcccgcgacctcggcgatgccgagcacaagctgcgcgccctgtggggcctgtggaccgaccgttgcggctgcaaccagtacaccgaagccctggaacttgccgagcgctatatcgcgctgaacagcagcggcagccaacaattgctcggcaaacgcatgcgcgccgtggcgctgttccacatgggcgacctgatgggtgcacggcagaacatcgatgaagccctgggctcgccgtcggcaccgcgctcgcacatcatcgacctgcacttcgaccaacgcatcgccgcccgttgcctcaaggccaaggtgcagctgcttgaaggcgacgtcgacccggcgctgcgcctgatcggcaactgcgtcgacgaagccatctccctcgaacaccccgcgaccctctggtacaccctgtgcctgggcgccatacccctggccctgctggcgtccaacctgccgaaagtgcgctattacctgggcctgttgcaagacagcaccaccggccaggacctgcacatttggcggcaatttcgcctgtgtttcgaaagtatcctgctgatccgcgaaggcgcgccggaaaccggcgtgccgcaactgggcgaagccttgcaccacctgcaaggccagggcgacagccagctgtacagcctgctgcgctgtgaatacgccctgggcctggcgcgcctgggcctggaaaaactcgccctggaagtgctggaagacaccctgcaattggccctcggccgccatgaacgctggttcgtgccgcaaatgctgcggatcaaggcacaactgaccttgcgccaggcgcactatggctcggtggacaaggccaccgtgctgctgcgccaggcgtgggtcgacgcgcagttggcgggcgcgcacttctggcgggcgcagatcgcgaccgacctggcgcgcctgcaagaacccaagctgcgcatcgcctccctgccgcgcttccagcaccgataaagtggcgagcagacttcctgtggcgagcgggcttgccccgcgctggggcgcgaagcgcccctaaaaccaggcgacccgtttccggctggagatatgcggtgactgggtttgagggtcagataaggcgagcagccaccagccagtccgccacggcctggaatgaagcatccggcaccggatcccccggcacggtcctgcgcgcgatctcagccgccaggcccttgtccggcgcatggggaatccccaggtcatacgcctcctgcagcatcaacaacgcctcctccggcgaagcccggcacacgatcaccggcaccggggtttccccgcgtacataacgcacgccaatcacccagccgtcggtggtgccgatcatcaaggacgcacggcccaagcccagcttagtcgccagggcctgcatctcattgcgctggcggcggcgttcgcttttgatcagcgggtcgccgtcgatgtccttgcgttcgcgcttggtctcactgcgggtcatcttcatgtcgcggccgaacagccagcgttgcatcatcacgtccacgccgcccaccaggatgaacgcgcacagcacggtgaacaccagcggcttgagcaccaggaaaaacgtcgaatccatgcactcggcaccgcagcgcgacgactccatcagcgcctgcaacgcatgcttgccgaccacgtagaacgcgattgccagcacgtgcaccttgatcaggcccttgatgaattccaccaggttgcgcagggcaaagatcttcttcatgccctccgccgggttgatgcgtttgaactcgggtttgatcgggtcggtcgagaacacaaagccgcgcatggtgatgatattggtcaggatcaccaccccagtggtcaccgccatcaccggcaaggtgatgccgatcaccagttgttcggcgtggtcgagcaccctgggccacacggtggcgaacggttcgatgtagatctgcgcggtgaggtcgatcagcgccgcgacctgggccttggcccgtggcgccagaatggaaatgcacagcgtacagaacaggatgaccatgcccgacaccaggtcctggctcttggcgacctggccctttttacgtgcgtcctggagcttcttgtccgtggccggctgggatttttcttcgctggtatcggccatgggctactccatgccggccagggtcttgagcagttcgacggtgccgcgaaactccgctagttggtcaagcatcagcgggatcaggaagccgatgtagatcaccatcaggatcgtgaaaaacaggtttttcaccggcagcgacaggtcgaagatatgcaggttcggcgccatgcgcgacaggtaggcgagcatcaggtcggtcaccagcagtgcgatcaacagcggcgagaccatcagcaccccgacgcgcatgatctggtcaaggatcgacaacaccgccagcagcgccgagctggcgaacaccggcgtgaacgaggtgaccggccagagctggtagctgtggtaatagccgtcgaccatcagaatgaaaccgccggacatgaagaacagcgtgatcagcatcaccgtgagcagggtcgccatcacgctggactccccggacgacaacgggtccaccagttgcgccatggtcgagccgcgttgcaggtcgatcaactcccccgccacctcggcggcccagaacggaatgccgaacagcaggccgatcaaaatgccaatcaggaattccttgatcagcaacccggcgataaacaggctgccgtgctccggcatcgaggtcagcgcgtcgaacaccgggaagaacatcgggatggaaatcgccacggccacacagccgcgaatcatgccggtgagccccaaccggttgaacgccggggtgatcaccaccacacccatggcacggcaggcggccagcgacgcggagctgatcaccgggtaggcgacttcgaggaactgcgcggtcaggctggcatccatgggcggtcagcgcgtccacatcgggaaattatccagcacctgaccaccgagttccgcgacttgtccggcgagaaccggaccgaggaacacgatggtcagcaacaccgccaccagcttcaccacctggggcaacgtctggtcctggatctgcgtcagcgcctggaacaggcccacgctcaaccccacgataatcgccacccccagtgccggcgcggagagcatcagcaccgtcatcagcgcctgtttcatcaatgacaggaatacgtcctggcccatgggtcgtgcctcagccgtaactcagaatcaaaccgtgcatcaagcgcgaccagccgctcagggacacgaataaaaagatcttcagcggaatggagatcaggttcggcgagaccatcgacatgcccatggccatcagcacgttggacaccagcaagtccaccaccaggaacgggatatagagcaaaaagccgatctcgaaggcgcgggtcagttccgagctgacgaacgccgggatcagcaccaccaagtcatcgtcacgcaggtcagtgcgtgcctcaggcgaccagatggtctcggtggcctgcacgaaaaaaccgcgttcggactcattggcgaagcgcttgaggtgcgcctgcaacggcggacgcaatgcgtcgcccaaatccttgagttgctccacatgctcgatgttgaggtcgcgcccctccacctgtcggtacatgtcgccaatcaacggggtggtcacgtacaccgacaggatcagcgcaatgccgtacagcaccaggttcggcggcgtctgttgcacgccaagggcgttgcggatcaggaacagcaccaccgagatcttcatgaacccggtgagtgtcaccaccgccagcgggatcagcccgatcgtcgcaacgaccaggatgatctcgatcaggttcggctgatagccggtcatggggtggcaaaactcagcaggcgcacccccaggccgtcaccgattttcaccagttggccctggccgacgcggcggccgttgaccatcaggtcgacgctgtccacgcccggcgtgttgagctgcaacaggctgccggcgcccagttcacgcaattgcgccagggtcagttccaggctgcccacctggcacaccagtttcaacagcaggtcatccagcgcaacggcggcatcaacatcggtcatggcgttctccggttcggcaaagggggcttgcaaggcttcctgcaggcgcaggacttcgccctggtattggcagcgcgcctgcaggcggccgtcgaggtcgagcaaaaggcccgggcctggttccagcatcagcacatcgccggggcgcaggctgcgcagttcgccgaggctcagccactggcgccccgccaccaccgccagggtctggcacaggcctggcaaggggtcgggttcgacctcggcgtattgcgccagcaactgcgcaaccagcaccgcggcgctttcgctcaggtccagctgggcgctcatcgcgggttggttgccgaaggtcaattccagcgccaaccgcagggcaaacacgccctgctcatcagcggtttcgagcacctgcaccgggtgaccgagcaacggttccaaggcttcgatcaggtcgagcagcgccagctccagcaacaacgcgcgcggcagcgcaggcaacggctgcacatcgaacggcagcgccagcggcagcgtcagttgctccagcgccgcagcagacagacgcaggcgcaccggggcacggcccagcgacagcaacacgtcacgcggcgcatcaaggctgtgcactgcggcggcccagctcacgcgcaggtcctgcccagcgcaacggccctgccaggggcggcgacggcgatgcagttggttgtgcagggccagcaatgccgggtcgtagtgggtcagccacggcgacagcgggtcggcaagggctgcgatcatatgccggtgccctcatcacgcaactcgccaacgcgacgctcatcgctttcgcggccttcgagcaggctttgccaggcgtcggactgacgctggcgactcagtcgctcctgacggaacagatcgcgttcgcgctcctggctttccaaggtgatggagacgtggctcacatcgttttccagttgctgctggtcatccgacaggccgcgcaagcgatcctgggcggcctgccaactggcgaccgacaggccttcggtcagggacgcataaacctgccgcgcttcctcggcaatcgcctcacggtgcaggcgcaattgctccttggcgtcggtcagcacaccgtgggtctgctcgcagcgttgctgctgcgcggccagttggctggcggcgcgttgttcgcgcaacacccgcagggtttgcagggtacgtagttgttcggttttcattgggctgtctccatgttcatgccgatacacacatcggtggtgagcctgcttgttgtggcgagcaggcttgtcctgcgttggggtgcggagcagccccttgtaaactcaccaggctcttccagataaaactcagcgcctggttttggggctgctgcgcagcccaacgcggggcaagcccgctcaccacaacaggcctacccagcacaacaggcccgctcaccacagcaagcccgctgactacaacaggcctgctcaccaccacaagtcggttcatgccaacacctggcgcatgcggttcagggtttgttccaggttgctcggctcatccgcgttctgacgcaggaaggcttcgatagcggcgtggcggttgatcgcttcatcggccaggggatcgctgccggcggagtactcccccacgcggatcagcatttcgatctcgccataccgcgccatcaattcacgcatgcgcatggccagtcgcttgtgttcttcaccggcgacctgctccatcaaacggctgcgactgcgcaacacatccaccgccggaaagtagttgcgctgggccaactcggcactcaacgcgatatgcccgtcgaggatcgaacgggcctcttcggccaccggatcactggcggcatcaccctcggtcagcacggtgtacagcgcggtaatgctgccgctggggccggggccggcgcgttccagcaaacgcggcaaggccgagaagaacgacggcggataaccgcgccgggtcggcggctcgcccacggccaggccgatctcgcgctgggcacgggcgaaacgtgtgaggctgtccatcaacagcaatacgttgcggccctggtcgcggtggtactcggccagggtggtagcgacaaacgccgcacgcacccgttcggcggccgggcggtccgacgtggcgaccaccgccaccgtgcgcgcacgcgcctgggcgtcaagctgcacatcgagcaattcgcgcacttcgcggccacgctcgccgatcaggccgatcacgatcacatcggcttcactgttgcggatgatgctggcgagcagcgacgacttgcccacaccgggctcaccgaagatgcccatgcgttggccctgggccagggtcagcaggccatcgatggagcgaatgcccaatgccatggagcgcacgatcagctgccgcgaaaacgctgccggcggttcagcgtgcagcgggtaatgctgcaacgctacggtcggcggaacgccgtcgccgtcgaggaaatcgcccatggggctgatgacccggccgagctgcgcatccccgacggccacgcccagggtttcgccggtggcggtgatttgggtgcgcgtggacaggccttccatggagccgatgggcgacaggatggcttcgtcgccgtcaaaaccgatcacctcggcgctcaggctgcgcgcgctgccggggtcgcgcagctggcacagttcaccgatgctcgccccggccacgctggcgcgcagcaatacaccgcgaatactcagcacggtgccgtgcatgggtcgcgggcgcgcctgggccaggcgttcggtgaggcgtggcagcaggtgttccaggttcatgccacgccctcttcggcgaagggcaacaagctgcgacgcaggttctgcaattgggcttcaaggcccagttccacagagccggccgggctgttcaggcgggcctggccggcgctcagctgttcatccgcatccactgcaatcgccagcccctccaacttgaggcgttggcgcaaggcatccacgtccgccggcggcacccacagggtcagggcctggtcctggcgaaacgcgctcaacgcctggcgggtactgcgcactacgcggtcggccgtgtccaactcacccagcacttcgcgcacgatacccagggccaggtcgaccagggacgtttccagactgctcaagtaatgctgcacctgggcttgggtagcgagcagcagttgcgccacctgttcagcaccggcttgccgggcgctttcgaaaccctctgcgcgggcgctgctcagccattgctcgctgtcggcgcggatctgctcggcctgcgccttggccgcctgcaggaaggcaaaaccatcgctccatagcgcggcgtcttcggcgcgcaggatgcgggcggtggggcggcttggcaattcagtcatggcgtgatctcctcggccagcaggcacgcggcggcggcctggacgatttccaggtcgcgtggcacacgggcgctgtggccctgggggaaggcaaagcgcaaacgcagccagccctgccagtcggcatgctgggcgtgcaaccaggccgcgacgcaaccttggccatcgcggtcgatggcgtcgaccaactcggccggctcgcgcagcagatccgccgcgccaccgagttggcgcaaggccagggcgctcacgaagacttcagcgcccaggccttcgcgcaattcattgaccacttcgcgacggatctcgcggctcagggtcggggcatgccagatggcgccgcacaaccttggcaagcgggcaaactgtgtcggcgacagcaacagcaccgccaagtctgccgccattggcgtggtcaattgcgccatgggcgccagttgatactggctgaccagcaactgctccaggcgctggcgaaagcgtggctggccctgcatcgcctgcagcacggcgtctggcaattcatcggcaaaacatgcacccaggctcggcccgcgcacaaaccgcagcggctcggcaatcagcccctgccagcgttcgaacaaactcattcaccctccttgagcacatacaacgcctgggactgacgacgtgcccactgctgacgggcgagcacacccaccgcaccgagtgcgatcagcaacaaggcgccgaacatcagccgcgcctgggccaggttgtcttccagcagccacaggcccatgaaccgcgccaggcgcggctgcgccgggttctgactgatggcgacggcggccttgatcgcggtcaccgaaacgccgtcgtaactcaacccggagatgccgttggcgaccagcgtcttgatctgcgggatcagcgtattgatatcggtgtccgggtcgtaacgcaccagcaccgaggccgacgatggtgaaatcacgcgcttgagcaggtcattgtccggcagcaccacgtgcacgcgggcggcgacgatgccgtcgatctgcgacaccgagtgcgacagctcttcgctgagcgcatagatcatctgcgcccgctcctgcaccggcgacgacaccaggccgttgcccttgaacacttcgcccatgttggaaaagctctgctgcggcaggccggcgttgtcaagcagggtcatggcttcggcaaagcgtgactcatccaccaccaccttgagctggccgttgtcctgggccttgcgttcggccgggacgccaccgcgcagcagtaccgcgaccatggcattggcgtcgcgctcgctgaggttggtgtagaggtcggtgttgcacgcctgcaacaggctggcgagcaggccgatcagcaacaggcgcagggcgcggtttgggcttggcatacggttattgacccttgagcagcgtgttggcggaaccggaaatctgtgtcgcaccgcgcaccaccatctgggtttcgatggagtaatcgaacatcttgcccagggagtgaacgatctggtcgacctgttgctcgccgacttttttccccggttcaccctggggcgaagcactggcggtgcggatttctgcctgggccggcggcggtgccgaaggattgttggtgagcaggtcggcccgttcggagaaagcccgcgtacggtcgatgaaactgttcatgcgctccatcaggcccgagccgatctggtgcgggctggcgccttcgggcatgcccttggcggtgttggccatgtgctcgaacaggttctgcgaggccccggcgggccccgcgccggcagacggcggcaacgccgaagcaccggcagcgagactgatagtcataggggtttcctactcttcgtcgtcatcggacatggcgtcgttcagcagttcctgcatcttcggcatgatgatgaactggccgccataggtgaccgcctgggtgatgaacgaatcggtgagttcggcgtcggtgggctcgttaggtttatcggcggtcttggcgttttccaccgccgcattgaacttggcttcagggctggcgccaccaggggtgggattgctgtctacggccgttacggacatggtgctgctcctttactgggttggggtttcggtactgacttgcgcgccacggaacacccgcaccccgcgctcgcgcgccaccggggcggcggcgaccttgggttgcaggtgatccacatgctgctgcaccagcgccaggtacggcggtggtccggacacgaacacttcatcgccctcggggccgttgcgcatcgacaactgctggccgaacacatcgaggttgttgaggtaggcctgcaactggtcgaggtccagggcgttggccttgaagagcttggtgctgatttcatcgctggcgttgaggtacaagaggttgccgtcgaagtaccaggtgaggccgttggtgctgcacagggtttgcaggaactccccggcggtggccgcgcgaatcgtgctgcgagccttgccgcggaccttgtcggagagcaccagcggcacatcgaggttatgcccgaattcttccagggcactgcgtacatcctggtccaccagtacgtaggcgtacggctgggagaaccaggcaggttcttcggcagcgtgggcgaaactggcgctgaacaggcataggacagccatcaaaaatatgcttacatggcctccgccttcgccagacgagttgtgacgatgacccctagatttctgctcgccagtaccctgctgctggccgcctgcgcccaccagcctgcgaccgatgccgacaagtccctgcaactggccaacgacctgagcaagcgcggcgactacgccagtgcggcagcgctgtacgagcgggcggcgcagcaacccggcgcgggtatcgagctgtggctcaagctcggccaggccaagctcgacgccaaggatgcggcgggcgccgagcgtgcgttccagcaggccctggggttcgatgcgcgcaatgccgaggccctgctcggcctgggcaccgcgcaattgcaagtgggcaagacccagcgcgccgccaccgccctgggccaggcggccgagatcagcggcttgccggttgcctacacccgcctgggtgtcgcgcagatcctcaatggccaggccgctgcggcgcaaaccgcgttcgccaagagcctgagcctcaagcccgacgacctcgacaaccgctgcaacctggccctggcgtatgcgctgggtgggcagtcgcagcaggcgctggacaccatcacccccgtcgcccagtcgccccgcgcattggcgcggcatcagcgtaatgagttgttggtgatggtattggcggggtacgaaggccgcgtcgctgcgctgccgttggacgatattcccgcagccgagcgggcgcggttggtggatgaagccaagcggatcagggcgatcagtgatcccgtggcgcaggctcgggagttggggttggtggatccgcgctgaatctgctgcagatgacttttctgtggcgagcaggcctgttgtggtgagcaggcttgccccgcgttggggcgcgaagcggcccctgtcaaattcaccgcattccaacagacagttctcagcgcctggttttggggctgcttcgcagcccaacgcggggcaagcccgctcaccacaggaagcccgctcgccacaacaggcccgctcaccagtataggcctgctccccacagcaagcccgctcgccacagcaaggaacacaggtcattgcttgccccctgacgcatcagccttggcttcctgctggtccttgcgacgctgcaattgctcgcggtcgaacccttcgatgtacacctgggcagcgcggcctacgggcgcggccatggccgggccggtggcgcggccttgggtcaggtcctgcttgcgctcgaccatttgcatcaggttcaaattgttcgcacagccaagcgccaacgtcggtttgaaatcctcacccaacccgacggtgtccgtcgccgggggttgctggcactgggtcggcaagccatcggcgcggtattcggacgagtaatacgtcggcgccaggtgggtctggcaacccatcagcgccaggggcaacagcagcaacacacgtaaaacagtcatggcaggccccttgatcaattcatgtagaaaccgaacgccccgccgctgcgcggtccggtggccgctgcggtagccggtggtgcgtcgaggggcgtggcgaggttgcgaccgcgcaccggctccaccaggtacggcgtaatcaggatcaccagttcggtttcattgcgctggaagcgcttggagcggaacaggttgccgaggatcggcaggtcgcccagcagtggcagtttctcgatgtcctggctgctttggcgctggaacaggccggcgatggcgaaagtctgcccgctgccgacttccacccgggtatcggcacgacgcacgctgaaggacggcacatggaaatggccgaaatccacggtgccgccgctgaccacctggctgacttccgggcgcacttgcaaggctatgcggccgttgggcagcagggtcgggttgaacaacagcgacacgccgaacgacttgtattcgatgcccaccaggtcgcggttgaccggcaccggtatcgccacttcgccaccggcgaggaagctggcggtctggccggtcatggcggtgatgttcggctcggcgagaatctgcagcacgccgttggcctgcaaggcgtcgagcatgccgtcgatattcacattgccggagcctgcgcctgcagcggccaagccccccgccgacgctgctgccaacgggccaccggtgatcaggccgaacgagaacgtgccgttgttgaacatcgcattccagttcacgccgtagtgcagcaactccgaacgcgacacctcggcaaagcgcacccgcaggttcacctgggcggagcctgcatattcagtggtgttgatcgcgctctggaaaccctgcccctggggattgagcagcgcgttcaggtctgtggcttccgccaccgagcctacggtgcctttggcgatcagacggttaccggcaccgctgatctgcgcagcgttgccgggatgcaatgcctgcatcggcgccgtcaccgcctggctggcgctgctgacggccagactcaggttcgccagttgcttaccgtcactgccgagggcgatcaggctggtgttgcccggcgccttgccgaagatgtagatcgtgcccggtgacaccacctgcaagtcggccacattcggttcggccaccagcaccgtgtccacgggagcgacaaaatgcaggatgcgcccttcaccggaggccagggcgatagagccaccggcgccggcggcgatttcctgagcctggctcacgcacgaaaaaacactcagcaacaatacacaaaaacgcatcatgaggcagacgccagggcagtgacggaagccgcggcaggcgcgcggcgattggaaatctcggtcaggctgatggtcaccagcgcttgcaagttgtactcggtggccagctcgcggaacgacagcaccgccagttccagctcgccgcgcaccaccaggcgacgcaggctgcggcgcagttccgggtgcaccagcaacaccgcgctgttgacctcgcgggtgtgctcgcaggcctggcgcagttgggtgagcaaggcgcggctgacgtcctcggggatcaactcgcgctgcggttcctggcgacgcagggcgccgcgcaactggtcttccaggcccggcgccagcaccagcgcaccgatcacccggttgcggtcggcgtactgatggctgatctgccgggccaacgcggcgcgcaggtgttcggccaggcgcccggcatcggtttcacgggcgccccactccaccatggcttcgagcaaggcacgctggttgcggatcgacacaccttcgccgaccagcaaacgcagggtttctgcgacccgttgcaacggcaccaggcgcagggcttccttgaccagttcgccgtaggtggcctcggtgcgctccagcagcaggcgggtttcctggatgccgaggaagtcggcagcgtagcggcgcaggctgcgttccagcacaccgcgcaacacctcgtcgggcagcaggaaaccgatgccggcgttgcgcaacgtgtcttcgtgctggcgctcgacccagtgggcgttgcggcccgtgagcggcgagtcggcctgcaccgtggcgaggtcgagcaactgcacgtgcaccgggtcgtcctgcaccagcaggcagttgatcggcaactcgccttcgctgaccggcacgccttccagggacacgcggaaactgcccggtgtagccttggcctccatgtagatgcctggtaccggtacgtcgacgccgagttcggtgcgcaagtcgtggcacagcgcttcgacgcgttggcgcagcagttggcgcggcgcgctttgggacacgccgctgccgatggtcagcagcacgcgggcgtcgggcagcaggttgtcatccagttcggcctggacttcgaccaccggctccggcgtctcgaccaacacttcaagttccggctggcggtgatgccggcgatacatcatgaacgccgcaccgccgaacaccagggacaagccgaggaacacccaggtcggaaaccccggcaacaggctcacgccgatcatgatcaacgcggtcaaccccagtgcacggtagctggcgcccagttgcttgatgatctcgctgcccaggtcccccgcttcaccgtcgctgttgacacgggtgaccacggtgcccgccgccaccgaaatcagcagcgccgggatctgtgcgatcaggccgtcgcccacggtgagcaacgagtaggtgtgcaccgcgacgccgaacggcatgtcgcgctcgatcatgccgatcagcatgccgcccagcaggttgaccgccaggatcaccaggccggcgatggcatcgcccttcacgaatttcatggcgccgtccatcgcgccgaacatctggctttcgcgctccaggcgtgaacgccggcgccgggcttcggcctggtcgatatcgccgttgcgcaagtcgttgtcgatgctcatctgcttgcccggcatcgcgtccagggtgaagcgcgcggccacttccgctacgcgctcggcgcccttggtgatcaccacgaactgcgccacggtgatgatcaggaacaccaccatgcccaccaccacttgcccggcgatcacaaagtcgccgaaggccttgacgatatgcccggcatcgccgtgcagcaggatcaagcgcgtggtggtgatcgacagcgacaggcgaaacagcgtgctgagcaggatcagcggcggaagcgcggagaactccaccgaatggccgatgtagaacgccacgatcaggatcaggatgctcagggcgatattgaggccgatcagcgcgtccaccaggtaggtgggcagcgggatgatcatcatcacaatcgccatcagcatgaacgcgacgatgatcacgtcggtacgctgcgcagccaggcgcgccaggttgttcaggcggttgagtgcactcatgcgccggccctgcgtgcggccaggtagcgtttgaagcactggcgcgcgtcgtccttgcgttcgccgtaccacaaggcgcgggcgcgcagcagcaacaggctggcggactcgccttccagcgccaccagacggtcgagggcgccgagggcgcgagtcgcgtcgccgctgtcggtgaaggccagcaccagcgagcgcagcaacgcgccgtcatcgggagcgacgttgaccgcgatcagcagcatcaccagggcgcgttgggactggccattgcgccggtacagctcgccgatgcccttgagcagttgcacggcgtcgtcgttatcgcgagccatcaggcatgtacctccgagcgttgctgtgcgagggtgcggcgcatctcgatttcttcaccgatcagctcgacggccagttgcttgatgtgtggctcggtgtccaggctgggcaggatgtgttccatcacatgctccagcagctccagggaacgggcgctgccgaacagcagcgagtcgacgccggcggcgctggtgagttcttcgaggtcactgcgcagggagcggcgagtctgggtcttgcgggtcttgagcaccgcttcgaaagcggtggcctggcgcgaattgaccgggcgcacggcttcgaccggggcgctgcgtacgtcactggggatcaacgggcggggttcgactttcatcccagggccttagcttaaaagcatggtcacaacgtgaaggtgaagcgctcctcgccacgggcgaggatcacttggttgttttcgatgcgttccagcacccagttgtccgccagtgccgcgccggggtacaggcgcttgccgctgtcgttgatcacatagggatgagggccgaaccacacggcctggaagcgcacgcgcggcgccgccgcatcggcccgcgcggtgacacgcgggttgagcacgatctgctggccgtaacgctggtcgaaggctcgctgcaccgccagccactgcagtttttgcgactgttcgaaggtgccggtggcgctgagctggccgttgctgttactgactttcaccgtgtccagctgggcggcttgcagctgctgctccagccaggccttggcctgctcgcgggaaggttttttcagcggcgcaacgtcggccacggcggttgtcggcagcagcggtgcttcactgcgaaacgccagcgctccagcacagataaacagcagtgcggtcgcgacgatccagggggtcaatttgcgtggcgcgggcacgggtttttcagcaccgcccggcattgccaggctcacccccgccgtgccgatgcgcagctgcaccggcagccgcgcgcgatgaccgttgccttggggaatgcgcacattgccggcgatcaatacgtcaccgcccaaggcttcgaccgccacctggccgccttcaaaacgcaggcgcaggtgcaggccggcaatgccgggatcgctgagcaccagatcagccgccagatcggcgccaatggtgtagacaggctggtcgagcaccagggaactgccctgatgcaaaccgccggtcaccgtcagggtcggcgcgccagttgcggcgaacggacccagggaaatcagggctgtcatagtcgggtttgcccccttgagcctgtgcaacggggtcaagaatcaggataaaaacgggacttgaggggtaaacgggcagcgccggcgctgcccgtttggcgaatcagttctgcggacgctgtttggtggcgtccagctccgcttttttcgcggtgctgatttcggtgatcttggccgacttctcgatagccatgttgaaggtcgcttccatcttcgcgatagcgtcgtcggcgccgccggcttttactggtgggacatcagccatgttcatctccttgcatcgatagggaagttattcagttgcgcaacagcacgctgaaagtatgcaaaccggtgaaggcccaaaacgtcagacagtgaaccttcgaatcgccgttggtttgcatggaatccatactactcacgatcaaaacgccttcgctgtgaaagcttgtgaaacgtttcagacaggcactgtgaaaggtgtagctcaacctggcattgaaaaaaactcatcgccggagcggcatggaacttttagcagaaaccaaaaacacgccacaggccccgatttacggggactcacctactgtttacagaacgaagctgaacaataaacctcgatggagacgcccggcacagcgctgctcggcaattattttcgcgacaacgtcacatttttcgctaatagccttttgcccaacttccagggtatttcgatttgtaacaacagcgacttaatcatcgcgtttgataggcctcccccaacaacctaattgcggggggagcaactttccgccgtgcctgttagtgcaactgcactaataaccaaaggacgcgtttgcaggccggctatatatgaaccttccaggtgatctatgaccgacatgaattattcacccccaactttccttgaagacgacggttgcgttgagattcacttcggcccttatcgactgctgcccaagcgccaccaactgctcaggcatggccagccggtaaaccttggcagccgcgccctgaccctgctgatcgccctggcctcgcggcccggtgaattgctgcagaaaaccgaactgctggacatcgcctggccgaaactggtggtggaggaatgcaacctgcgcacgcagatcaagacgctgcgccgcacactgggcgatgacgatgtgccgtacatcgccacggcagcgggcatgggctatcgttttgtcgcgcccacctggttcgagcgggcggcgcacccgcgggcgatgaggccgtcgggtggtggcggtgaacgtgtggcgggcggcttggtttagctcagggcgctcaggtccagatgcccatccttgatcggcgggcaccagtagtaaccaccggtcaagggggtgctgatgcggtacagaccatcgacaatcccatcctccaacccgctcatgcggcgcagttgcgcttcgaacgcatcgaaggaatgcccgaacgcgaggaacatcaaccctgcctggccattctcggcccatggcatggagcgacgtaccacgaaggcttccggcgtgaagctttcctgggcggtgcgcttggtgtgggcggactcgggagcgtcgtcgagttcttcgttgtcgccgtggcggcgaccgatgatgtggtcgcgctcctgagccggcagcgcagcgaagccatcgaggtcatgctgccattgctggagcgcggcaaagctggcgccgctgtcggtcagggcggcttcaaccgcggcgtcgtcgtgggggttttcggtgccgtcttcgtagtcggtgaggtcgaagccggtcttgtagcggaaaccttcggtcatctgcaccaggcgaaatgccggggccagggccttttcaaaggcacggctgcgcaatagcaattcaccgcgatcctcgccatgcagccacacccacagagcttgctgagtggacggattgtgtgcgcccggcccgctgactgccggaaaactgcgcaagccttcaacgcgtgtgcccagtgcggtgaccaacggctcgcccagaccgaccactgccgccgagtcgaccagttgcaccagcgcgtccagcgcagcaggcacggcggccagggcctccacggcaaaaaacagatggcgtgcctgcaacggcaccggtgcggcaagaatgcccggctggtactgactcatgtgaactccttctgaaaagccgcgcagtttaaccgccgggctcagccatgcgtactagaaagcgcgcaagccttgccatagagcctgttgttgggtgactctctagtcatgttttgcaactattccaggggtagcgccatgaccaccagcaacctgctcgctcagctgtttcccgcctccgccgccgcagttcccaagcaattccagctcggagcgcccattgaacagcgtgattacctggtcgacggccagttgcaggtgtggaacggccccttggccaaggtacaaagcccggtgcagtttggcgacgagcgcgtgcatatcggcagcacaccgctgctggacgccgagaccgcccttaccgcactggatgctgccgtgcgtgcctatgaccggggccagggtgaatggccgacaatgcgcgtggccgagcgcatccagcatgtcgaagcgttcctgcggcgcatgcgtgaacaacgcgacgcagtggtcaagctgctgatgtgggagatcggcaagaacctcaaggactcgcagaaagaattcgaccgcacctgcgactacatcaccgacaccatcaacgcgctcaaggaactcgaccgtcgctccagccgcttcgagctggagcaggacacccttggccagatccgccgcgtaccgctgggcgtggcgctgtgcatgggcccctacaactacccgctgaatgaaaccttcaccacgctgatcccggcccttatcatgggcaacaccgtggtgttcaagccggccaagcttggcgtgctgctgatccgtccgttgctggaggcgttccgcgacagcttcccggccggggtaatcaacgtgatctacggcagcggccgcgaaaccgtcagtgcgctgatggccagcggcaagatcgatatctttgcgttcatcggcaccaacaaggccgccagcgacctgaaaaaactgcacccgaaaccgcaccgcctgcgcgcggcattgggcctggatgcaaaaaaccccggtatcgtgctgcccgaggtggacctggacaatgcggtcagcgaagcgctcaccggctcgttgtcgttcaacggccagcgctgcaccgcgctgaaaatcctcttcgtgcatgaagacgtggtcgaccgctttatcgagaaattcaaccagaagctgaccacgcttaaacctggcatgccgtgggaagacggcgtggcgctgacgccattgcctgaaatgggcaaggtggattacctcaacggcctggtggccgatgccgcgcaacacggcgccaaggtggtgaatgaggatggcggtgaaagccgtggttcgttcttctacccggcggtgctgtacccggtgaacccgcagatgcgcgtgtaccacgaggaacagttcggcccggtggtgccgatcgtgccgtaccgcgacctggagacggtgatcgactacgtgctggactcggacttcggccagcaactgagcctcttcggcaccaacgccgtggaagtcggacgcctggtggacaccttcgccaaccaagtcggccgcatcaatatcaacgcccagtgccagcgcggcccggacaccttcccgttcaacggccgcaagaactcggccgagggcacgctgtcggtgcatgacgcgttgcgcgtgttctcgatccgcaccctggtggcgaccaagttccaggagagcaacaaggcgctggtcagtgacatattgcgcaaccgcgattcaagtttcttgaccaccgattacattttctgaaaacgacacacccaaatgtgggaggggcatgcccccttccacatttgggccgcgtaaccctgaatttcgaggccactttactaccgatgaacctgcccttcttcgcccggcgcctgttgcgcccgttgctcgacccgtatcgccgctaccgccatgccaagctgatccatgccgtgcgggtctccatcggcttgctggcaacgatcctgctgactaccggcatcaacctgccccacggtgagtgggcgtcggtgaccatgctgatcgtgatcggtggcttgcagcaccacggcaatattggcaagaaagccgtggaacgcgcctacggcaccttgatcggcgccagcgtcggcttgttgctggtggtgcagcaggcctacttcggccagcccttcctgacctacctgttgatgtcggcggtgtgcgggttcttttcctatcacgccatcggcaagggcggctacatcgccctgttgtcggcgatcacggtgtttatcgtcgcaggccacggggacaacccgatctccgatgggctatggcgcaccgtggacatcctgatcggcattgtgctggccttggcgttctcgttcgccctgccgctgtatgccgtgtactcgtggcgctacaacctggccagtgcgttgcgcgattgtgcggcgatctacagccggatcatcaatggccagtcggtcaccgatgacgagcacctcaaattgctcaatcgcttgaacgcggcgatgctgcaactgcgttcgttgatgccgtcggtgtccaaggaagtgcggatttccatgaccgagctggacgcgatccagcggcatttgcgcatgtgcatcagcaccctggagattcttggcaatacccggcccgatccacgagatgaacaggcgatggcgcggatgcaggtgatgttgagggccgaacatcggcaaattcgggtgcagttggtggggatggcgcgggcgttgaagtcgggggtgacggagcggttggagcggcccagccctatcacgggcaccgagccagcactggatgcgccagtctacagcgcgctggatggctatcggttgttgacggtacaactggcggcaaacgtggatgcgatgcgccaacgcctggccaaaagtgccgggcactggaagatctagagaggtggcctgttgccgtgtttaccaacgtcaacactttcacactttctcttacatatttttcacgttttattcacatcccggaacgtagggtgaagcctcatccgttacaaatgttgcatatcaagcccgccgccccagcgggcttttttttgcctcggatttgacctagcgggacgccttgacggcgggggctgtcgcttgttcgcgaatggcccgctgggtatccagtaccttggccaatgcggtttccgcttccgggctttgctgtggcacacgaatcgccgccgacaccagggtgatcaacttggccatcacctcggcatccgtcgccgggcggcccaggctcatggagttcatcagcaggcgcagctcggtgccggccatcaccccggaaatcgccttgagggcaaattgcaggcgcacccccagttcattgcgcggcaggtccggcaaggccagggcgaaggcttcgaagaaacgctggaacaccggctggtaatgcaccttgaggtattcctggataaacggcgaggtgtcgctgtagacccgccccaggaagcgaatgaacgaacgcccttccccactggcgctggccgggtcgctgcgctccaggcccatggccggggcaaacagcacgccgagcaaggtgtcgcagtccagtgggccgtcggactcggcttcacaccgcgccaacagttccaggcgctgctcgttgagcggctccaggcgctgcttgagcagggtttgcatcagggagtccttgtccccgaagtggtagttcaccgccgccaggttgacctgggcacgctcggtaatctgccgtaacaaaaccgcgtcatatccgtacttgatgaagagagcctctgtcgcatccagcaatcgagtcttggtaatgtttggagcgctgactttcttcgcgaccatagaagttccacgtgggaaatattgttttaaaaaataatttgattttttataccggggccgccgcctgaaagcaagtagtgacactgcgccatatgatcaaaagcctgtgcccacgggctcgttcaggctggtcgaacggtttttgagcggactgcgacgcccttgaggaaatcgtttcaaaggatgaaaccgctctatatccatggctggcgaagcagcaggaacacggttagtattcaaacaatattttaaaaacaagaaataaaaccagtccgtgacgcacgccaggccgctcccgaacttgtaacaatgcttttccggggaccgcacggcatcgtcgagactgcaggcgtagtcatgatgacagatacccccgcgcacccaggcttgatctccctgcaaggcatcggcaaaagctatcagctggccgggcaacacctggccattctcaatgatgtgtgcctgtccatcgccagtggcgacagctgcggcatcctcggtgcctcgggttcgggcaaaagtacccttctgaacatccttggcctgctggacctgcccaactgcggtcagtaccacttcgccggccacgatattttcaacgccacaccggaccagttggccgccatccgcaaccagcagatcggcttcgtgttccagagtttcaacctgctgccgcgcctcagcgccctggacaacgttgccctgcccttgagttatcgcggcgtatcacggcatgagtcagtggaacaggccctgcgcatgctggagcaggtcggcctggccgaccgcgcccaccaccgccccgccgacctatccggcggccagcgccaacgggtcgccatcgcgcgggcactggtgggcaacccgtcggtgatcctcgccgacgaacccaccggcaacctcgacagcaccaccgcacaggagatcatggacctgctgctggcgttgaaccgcgaacagcaagtcacgctgatcatcgtcacccacgacccgcatatcgccgagcgcctggaacgcaagatcctagtgcgcaatggcgtggtgcaagaggcccgaagcctatgagcttgcgggtcgaacaaagcctcagccagctgctgcatgaagcgttcgtcagcctgcgcaccctgggcaagcgttcggtcctggccttgctgggcatcgtcatcggcagttcgtcggtggtggcgttgatcaacatcgggcataacgcggcagtggatgcggcaatgatcttcaaggacatgggcaccgacaccctgatcgcccagttcccagccaaaggcggtagcagcatcccgatgcccgcccgcctcgacctcgatgccgtgcgccaaaccgtgccgggcattgcccatatcggcgccctcacgctgttcagcgggccgatcgtgttccacggccgcaccaccaacgccaacttcgtcggcagcacgccagacatcaaggacgcgatgcgcctggtgatacagcaggggcgcttcctgtcgagcttcgatgccaacgaaacctacggcgtgatcggcgaccaactggcccaggcgctcggtgcgccaggtgaccccctgcaactgggcgaccgcgtgcgcatcaacgactacctgttcctgatcgtcggcatcctgcgcagccagccccgggcgatgctgatgccggtgcaggccaatgagtcgctgttcatccccgccgaaggcatgcgccgcatctatgccacaccgcagatcggcaatgtgatcatccgcgccacacccggccaggacatggagcgccttgccaaggacgtggctgccgccttgagctcgcagctcgccgaccacgatgcagacatccaggtgccccagcaaatgatcgacggcatgacccggcaaagccgcaccttcgcctatctgctgctggccctgggggcgatctccctggtgggcggtggcgtcggggtgatgaacgtgatgctgatgaacgtctcggagcgccgtcgcgagatcggcattcgcatggccctgggtgcgcgccaacgcgacatccgcaacctgttcctgctcgaagccgtgaccctcaccgccgtcggtgccctgtgtggcgccgtgctgggcatgacggcggcctggttgtacgcctggctgtcgggctgggaatttgccctggcggtcgccgccttgccgctgggggtgggcagcacgttgctggtggggttgttcttcggcatctacccggcggtctcggcctcgcggttgcaaccggtggaggccctgcgcgatgagtaaatggctatggctgctcgcattcgccagcctgcccggcatggccgccgatgtggtgatcaagccctcggcccccagcaccacccgcagcggctacgagcgcagcgtgtcgttgaacgcccagaccaccgccatgaccctcggggatgcggtgtacctgggcctgcgcaacaacccggcgatccgcagcgcgtacctgcaacgggtggcccagaagttcgacctgcgcgtggccgaagatgtgttcaaccccaaactcaccctcaacagttactaccgcagcacccggggctccgccgacagtgcgcgcaatgccaacgtggcgcccgccaccagcctgctcggcgagtacggcacgcgcctgagcatggcctggacccagcaactgagcaacgccgaccgcgccggtcgctaccgcagcgacggcctggacctggcagtcatccaaccgctgctgcgtggcgccggctgggacgccaccaccgcgccgctgcgcctgtcacgcctgtcggaacaggccaaccgccttaacctcaaggccactgtggcgcagaccatcagccagatcatcgccacctaccgcgaactgctgcgcgcccaggagcaactgagcatcgtgcaggatgcgctcaagcgttccggcaccttgctggacgtgaacaaggcgctgatcagtgccgggcgcatggccgaattcgaaatcgtgcagaccgaagccgacatcgccacccagcaactgggcgtggaggaagcgcagaaccaactggacaccagccgcctcgccctgctgcgcctgctggcgctggacctgtccacgccgattcgcgccaccgaagccctggaggccaggcccatgcagatcgacaagcgccaggccttcaccctggcgcagacccagcaacccgaatacctcgccgccctgctcggcagccaacaggccgacctcaacttggtgatcgccaaggactcggggcgctggcaagtggacctggtggccggcgctaaccaggtgcgcgccaacaccgacaacgacgcgggccgttccaacaaccgtacctgggacagctacgccggggtgcaggtgcagattcccatcggcgatatcagcacgcgccaggccgaagtgcgcgcacgggtgaatgtggaggaccaggccatccgcatcaccgatgcgcgccaggaattggaacgcagcgtcaacgatgtggtgcgtgaccttggtacgcgctggcgccagtatgaaatctcccagcgcgccgtggaattgtcgcggcgcaagatcgaaatcgagcgggaaaaactcagcgccgggcgctccaccaacttccaggtgctgagcttcgagaccgatttgcgcaacgccgaaaacgcgcaactgaatgcgctgatcgcttatttgaacgcccagactcagctcgacttgaccctgggcatgacgctggaaagttgggaaatcgccctcaatgactactaatcagaaacgcctgctgggtgttgtgttgatcgtcctgctcggcggcgcgggcctggccttgcgcagcccggcgtccgatccaggcgctgccagcgaacagtggctggccgtcaagcccgaggcgctggagcaccggatcggcctggtaggcaagatcgagcccgacaccaccatcaccctcaccgcgcccttcgatggcaacgtgcaagccaacctggtggaacaaggccagcgggtcgaggccgggcaggtgctgttgcgcatggacccggccacgctggaggtgcaattgcgcgaagcgctttccgcccagctcaaggcccggcgcaccgtgcaagagatgcaggactgggacagtagccccgccgtcagccgcgcccgccgcagcctgcgcaccgccgaaatgaccgccggcaacacccagcgcaaactcaccgaaagcgaaaacctgttcaagcgcggcatcatcccgcgcaatgaactggacgacctcaagcaacagacccagcagcaacagctggaccttgcctcggcccgcagcgaactgcaacaggccatcgaccagggcaagggcgagtaccgccagatcgccgatatggaactgaccaacgccacggtgaaatacgacgccctgcacaaactgctcgatggccaggaggtcaaggcgccgttctccggcatcgtggtgccgccaccgggcaacacctcatcccagggcggcggcaataacaatgccccggtgcaggccggcagcaaggtcagccagggccaggtgctgtttgggctggcgaatatcgaacgactgaaaatcaccgccaaggtctcggagctggacatcaaccaattgcaccagggccaggcggtggaagtgctgggcgacgggtttgatggcgagcgcctgaccggctcggtaagcgtggtcagcggcctggcgattgccaacgacagccagggcagcgcgcagtttccggtgaccctgtcgatccccaagctcacgccgcagcagttgcaacgggtgcgcctggggatgagtgcgcgattgaccatcgtgacctacaacaatgcccaggcgatggtgattccgagccaggcgatccaggcagatcacacggtggagtatcgggaggcgatggataaaccggtggagcgggtgaaagtgaccacggggcaagcaacggcgcagggcgtggaggtgttcggcctcaagccgggcttcgtgaagacctcaagataaatggagcccctgccacatttagatctctgtcagctttgaagccagtgccttggcttgcagcgccacatcagtcaccgccgtgctttcccaccacatcccacgcaacggcgggcccatggcgaacaatcgctggctgacctgcccctgggcgtccaccactgcccccgacgtatccgccgcaatccccaacgccagcggccctggctggatcagcccacgcttgagcaactgccggggcaatggccgggccacgcggcgccagtcgtattcgataccgctggagttgatcagcgctgcgcctgagaccagggtgatgccttgttcgccgcgataacgcaaacgaatcgtcaccccttcacccgaaggttccagccccttgaacgacgccgcaaggatccgcaaccgcccctcttcatgcagccgcgccaccaactgcgcgctcaatggcggcgaacggtggtgatggctctcccaccagggccgcacatgcctgacgaactggcgcttctcacgctcgctggcctggctccataaacgcgcgatatgcgcacgcacggtgtccagcggcgcttgccagtcgatgccctgggcctgcgcaagcgcgcattgccgccgcacctcgcgcagcaattgccgagggctgcgcaggccatggtcctccccaagaaaatccacccaggccggcggttgccgccgcacatggggcagcaggccgtgacgcgagaacacctcgatcggcccgcgatgcccggcctgttccagggagaccacggcgtcgaccatggtcagcccggaaccgatgatcagcaccggcgcctgcgggtcgatccggcgcatcgcgctcacgtcccacgggtccaccgccgccgcgttcaacccgctggagtcggtctgcggtgtacgcgccgccgggaacatgccggtagccagtaccgcaaacgcgccacgcaattgctggccgttatcgagggtcagcagggttgagcctgcatccacttgcaggtcgaccacttcgccacgcacatgctccacgctggacgcggactgcgccttcgcctcggccaaacgttgctgggcatacaagccgaatatcccgcgtggcgggaacagttcgctgatcggcacgtgctgctggtcggactcgggccagccgccagcgccgatgtagtcggtgagccattgggtcaggtcgtctgggttgtccgggtcgacactcatgcgcgccgcgttgccgttcagggtgtggcccagttcgacggcgctgtaggcctcgccccggcccagctcggcacgcggttcgaccaccagcacccggcgcgcgcccggcaggcgcagcagttgcacggccagcatcgtgccgctcaggccgccgccgatgatcaggacatcagcgttgcggatggattcagtcatgcggagtcgcccttactgtttgcccaggtaaatgtcatgcagatcaccccgcgccagcagttcagcggcgctgccactcaaggccacgtgcccagtatccaatacgtagccgtgggacgcatagttcagcgcgacgttgatgttctgctcggcgatcaggaagctcacctgctgctcgcggttgagctgagcgatgatcgcgaaaatctcctgcacgatcataggcgccaaacccatggacggctcgtcgagcagtaccaaagtaggacgggtcatcaatgcccggccgatggcgaccatctgctgctcaccgcccgaggtgagaccggcgcgggtatggcgcttggtcttgagccgtgggaaccaggcgtagacacgttccaggtcgtgctccatgtcgcggcgactcaggcgtcgcacaaagccgccgctgcgcaggttgtcttccacgctcagttggccgaacacatggcggccctccaacacatgcaccatgccctggcgcacgcgctggctggggtcgatgccggccaggtcgccaccggcgtattcgatcacaccgcgactgacctcggcccgttcggcacgcaccaagccggagatggccttgagcgtggtgctcttgccggcgccattggcaccgagcaaggcgacgatggcgcccttgggcacgctcaacgacaccccggccaccgcgaggatcgcgccgtcgtagatcacttcgatatcgttgaccgtcagcagcgatggctgcgcggcagcggtggcgggctggctcatggtttattcatccccggtgcaggtgcgtggcgtcaggcctttttccttggcgaaggcggcggacttttcatcgatcaacggacgcaacagcgcacggtcggcggcgatccagtcgctgatcagcgtccaattggcgccgtcccactgctgcacccgcgccgagccgccaccctcgtggtcgcggcacgacagcttgaggttctgcatcaggcccaggtaacccatgtccttcaagcgcgcatcgtcgatgttcaggtgttccaggccccagcggccttcttcgccgttgagcgggcgcttgccgaatttggcctggccggtgcggatcgcctccaccgccacggcggcgttcaccaggccggagttgtagtagacgctgccgaagttcttcaggtccttgaggtcactgtggcccttgtcgaggatgtattgcttgaggcgtttgtggatctcgaaatccgccccggccgggtatggcgtaagggccaggtagcctttggcggcggcaccggcgggcaatacgtcttcgctggaactggcccagatatcgccgatgatgtggtccaccgggaagccgaagcgcgccgccgtcttcaccgccaccggcgtggacacgccccaggtgcgcaggaacacccagtccgggttggcctggcgcacctggcgccattgcgcggactgttcgttgccggggtcggccaccggaatctggatgttttcgaagccgtatttttccgccagcaacttcagcgggccgagggtttcgcgcccgtaggccgagtcgtggtagaccgtggcgatcttcttgcccttgagcttgtcgaaaccgccttcacgctcggcgatgtagttcaccagcgtcgaggcctcactgtagaaagtcagcatcaccgggaagttatacgggaacaccgtgccgtcggtggcttcggtgcgaccgtagccgagggtgatcagcgggatcttgtccacctcggcccgctcgctcagcgcatacgccgccggcgcgccattgggctggtacaccgcgaccggcgcgccatccaggccattcttgaagcgctcgtagcactcgatgcccttctccgccgtccactcggtctcgcattcctgccacaccagcttgacgccgttgatgccaccttcgacctcgttgatgtaacgcaggtagtcgatcatcccggcccacacctgcacgccgctggacgcataggcgcccacacggtaggtcgccaggggaatgaattgctggtccggcgaggccatcgcctgggggactgcaccggccaaagttgccagcgcaaaggcagcgccgaccagggaacgtttcaaggatgcacgcatagggattctcttaagggaatgtcagaaacgcagcggccactgccgcacgcggtcacgcaggttgtgcaacaggcgaatcaagccctcgggctccttgatcaggaacacgatgatcaacacgccaaaaatgattttctgcaggttctgcaactgccccgcatccaccgagccgccgaacagtgcctgcccggcgtggctgaggaagatcggcagcaaactgataaaggccgcgccgacaaagttgccggcgatactgcccatgccgccgataatgatgatgaacaggatctggaaggagcggttgatatcgaagctgctggcgctggccgtgcccaggtaggcaaaggcccacagcgcaccggctatccccaggtagaacgagctgaccgcgaacgccaggcgcttgtagcgcaccaccgggatgccgaccacggcggcggcggtgtccatgtcgcggatcgccatccagttgcgcccgacctggctgcgcaccaggttgagggcggtccaggtcagcagcagcacggtgaccagggtcagcaggtagcggcccaatggtgtgttgaggtcatgaccgaacagcgccagcctgggcgcggaaatggtcccggacgaaccgtagttgtagaaccagggaaacttgacgaacagccattccaggaagaactgtgcggccagggtggtgaccatcaggtagaagcccttgatccgcgaactgggcaggccgaacagcaggccaaccaacgcactgatgatcccgccgccgagcagcgcaaccggcaaacccagatccggcaggcgcagcagaaaaccgtaggtggcaaacgcaccgacggccatgaagccggccgcgcccaccgaggtctgcccggtgtagccggtgagcaggttcagacccagccccgccagggacagcaccaggaacgggatcaggatcgcattcagccaatagtcattgccccacagcggcaccccgataaaagccagtgccaacaggccgatcaaggcccagggaatgcgccgctgaatcagcagcaacggcgcggtgtgttgtacaagagggatcgacatgctttcagactcgctcgatggcgcgctcgccgaacaggccggcggggcggatatacaggaaggccagggccagtacgtaggcgaaccacggcgtgataccgccgccgatcaacgggccgatgtacacctcggccaggttctccgccgcgccgacaatcagtccgccgacaatcgccccgccaatcgaggtaaagccgccgatgatcaacaccggcaaggccttgagcaccaccagcgacagcgagaactgcacgccctgacgcgcgccccacagcaacccggccaccagcccgacgatgccggccacggcccagacgatctgccagatgcggttgaggttgatgccgatggacagcgccgccgtggtgtcatccgccaccgcgcgcagcgacacaccgatgcgggtcttgttgaacagcagcgccagcaccgtcaccagcaccaccgccgcagcggcagcgatcaggtcgaactggctgagcatcagcgggccgacgaacagcggcacgtcgtcgatgcccaggtccagcgcccgcacctgggagcccatcaacccctgggccaggccttcgataatgaacgacaggcccagcgtggccatgaacaaggtgatctgcgaacggttcaccagtggcctgaggaccaggcgctcgatcagcagcgcgccgacgctcatcacgatcaccgtgagcagcaacgccagggcaaacggcacgccctggtcatgcaggctgacgaaggtcagtgcagcaaacagcagcatcgcgccctgggcaaaattgaatacgccactggccttgtagatcagcacgaagccgatggcgaccagcgaatacatggtgccggcgagcaggccgccgagcagggtttcaaagaaaaacgtcatccgtttaccactcccaggtaggccgcgatcacctcgggattggcttggacctgagccggcgtgccgtcaccgaccttgcgcccgtagtcgagcaccaccacatggtcggacaggcccatgaccacgcccatgtcgtgttcgatcaacaccacggtggtgccgaggtcgcggttgacgtcggcgacgaagcgcgccatttcctgtttttcttcggcgttcatgccggccatgggctcgtccagcagcaacaagctcggccctgcgatcaacgcccggcccagttccacgcgcttttgcaggccgtaggacaggttgcccaccagcacatcgcggtgggcttgcagctccaggaattcgagaatgccctgtgcgcgcaaccggaacgccttggcttcgcggcgtgcgcgaggcaagcccagggcttgttcgataaagctgctacgcatatgccgcgacaggccggtgaggatgttgtcgagcacactcatcttcttgaacagcgcgttgttctggaaggtgcggccaatgccgcggcgcgcggcgcccaacgggtcgatgcggtggaagtgctggtcctcgaacacgatctcaccggcatcaaagcggtacacgccgttgagcacgttgagcaacgagcttttaccggcaccattgggaccgatcagcgcgcagatctcgccgcgcagcacctcgaaggacagggcattgatcgccttgacccccttgaacgacagcgagatatcccgcacctgcaaaatggcctggctcatgcgatgtcccgtttgaattccgccacccacaccggtgaaggcgtggctttgacgggttgccagatgtacgccaggcgctggaaccccaggagccggcgcacgcggtttttcagcaggcgccgcaagccactttgcgggtgggcgatggcccagtcgcacaggcgtcggcgccaggtgccgtggggcgccaggcggctttcgatctcatcggccaggtgctgcaagcgggcgggcgacaacagcaggccggtgggcgcgacttcactgcggtcgcgacgcgccgaggccaggctctccgggaaggccaggccgtgaccactgttcagccattgctccagcaccacggccagaccgccctgccagtgggtaccctcttcgctccacaacagggtttcccccgtgggctgccaccagcgtgccaggtgttgcgtcggcgccaacgggccgagcaactgggcaaaatccaacaagttggccgactgccagtgccgcgcagtctggcggccctgcacataggaatgagtcgggcgaatgcgccacaggtgctgttgcagtgcctcgggctccaggtcatcggccagggtcagcacctgcccgccgatgacgtgcgccgccagggccagcagcaacaggttcggctcgaacgcaccgctgagggccagccgcgattgctcgctgaacccctgctggcgcaaaccatcggccaggcgttccacatcgcgcaaggcgtcgatccagcgccatgcgcaccactgcccccggcgcttgtggcgcagggcactatgcagcggcgtgatctgcgcccagtggtgcagttgttcgagggccttgggcaggtggccgagccactcggcgggccactccacggccagtgggcgtttgagttcgtgcacgctcataggggtagtgctcctattggtgtgtgtgcgtgcggtggtccgctggctggattatttggatcaacaccgatctactgtgggagggggcttgcccccgatggcggtgtgtcagtcacaagtgctttgactggactgccgctatcgggggcaagccccctcccacattggttatgtgcgcgtcagataaattgcggtagccggcaccagggtggttggaggccaaccttgcgccgtcgccaaacaacttctcgcgcaacgtgccctgggcatactcggtcttgtacaccccgcgcttctgcaactccggcaccagcaggtccacggcgtcgatgaaggtctcgtgggtcagcgcgtaggccaggttgaagccgtccacatcggtctcttcgacccattcctgcaacaggtccgcgacggtttccgggccgccgacgaacagcgggccaaagccgccgataccgacccagtcggccagttcattcggggtccagaccttgttcggatcggccgtcgagaacgcctctaccgccgattgaatggcgttggtgtgcacgtgcttgagcggtgcatcgggtttgaactggctgaagtcgatgccggtccagccggaaatcagcgccatcgctccctcgtagctgacgtaggatttgtattcctcgaacttggctttggccttggcatcggtctcaccgacaatcacggtctgcaagttgaagatcaggattttctgcggatcgcgcccggcttcggcggcacggcggcggatgtcggcgacggtctttttcagcagcaccttggacggcgcggcgacgaatacgcactcggcctgttcggcggcgaactgcttgccacggctggacgcgcccgcctggtagagcactggcgtgcgctgcggcgacggttcacagaggtgaatgccgggcacctggaagtgtttgccgacatggcggatctcgtggattttgctcgggtcgctgaagatccggcgttcgcgatcacgcaacacggcgccctcctcccaactgccctcccagagcttgtagcagacctccaggtattcctcggcgtagtcgtagcgcgcatcgtgttcggtctgggctttctggccgaggttcttggcgccgctttccaggtaggaggtgacgatgttccagccgatacggcccttggtcaggtgatccagggtggagagacggcgggcgaacgggtacgggtgttcgaacgacaacgacgccgtcaggccgaagcccaagtgttcggtaaccagggccatcggcgcgatcaacgacagcgggtcattgaccggcacctgcgtcgcctggcgaatggccgcgtcgccgttgccgttgtacacatcatagatgcccagcacgtcggcgataaacaggccgtcgaactttccgcgttcaaggattttggcgaggtcggtccagtattccaggtccttgtactgccacgaacggtcacgtggatgcgcccacaggcccggggattggtggccgacacagttcatgtcgaaggcattcaagcggatttcacgggacatcaaagcactccgttgaggtggtagttgccgacgatctggtacttcgtacgcagcgggtcatccaggctcgacggcagtgcggtgcgttggccggtgagttcgaactcggcgttgctcgcggcgatcagggcttcggcggcggcgatttgcgcttcggtagccgcgacggggctggggtgggtttcggcgcgttcaaacaaagccgcagccacatcgacgcgaatctgcaagtcgccgaaacggctgatcacgtaggggtcggtgctgttttcaacgtggcggcgggtgctgtccagcagttggcgcgcaaggttcagtgcagtcatgggtgaggctcctcagttccaggcgtggcgcgcaggcttcacgccgttgagcacgtagttgccgatcaggtggtatttccagcgggccgggtcgtgcagggtgtgggtgcgcgcgttgcgccagaagcggtcgaggttgtgcttgccggtgaccgagcgggtgccggccagttcgaacagtttgctgctggcgagcaaggcggtttcggcagaaaggactttggcttgggcaaccaccagtgaggcgtgggcgacgctgtcttcgccgggctcggcgagggcgcggtccacggcttcccccgctttggcgaggatggcttcggtgccgtgcacgcgccattccaggtcgccgatggcggcgatggtgaacgggtcctgccagccgtgatcctgttggctgtcgatccagggccgcgcctggcgtgcgtagattttcgcctgctccaaagcgccaacggcaataccggtatcgaccgccgcctgaatgatctgcgaaatcggaccattggcggtgggctggtcaaaagcctgatgcgcagggatcaccgcgctcaagggcacagtcacaccatcgagggtcacgccaccactggcggtggtgcgctggccgaaaccgtcccagctgtcgatcacgttcaggccgggcgcgtcacgttcgacaaacgcgataaaggcctggccgtcttcattgttgccgacggtgggcaccaggtgagcgaacagcgcgccggtgcagtagaacttctcgccgttgatttgcgcggtatcgccgtgaaagcgaatctgggtatcgaaggtgccggcgttcttgctcttggcttcggaaaaggcgttgccgaaacggtagccctggaggactttgccgaagtagtactgtttttgtgcctcggtcgcggtttgcagcaggatgtccaccacgcccaggtggttctgcgggatctgccccagggacggatcggcggcagagatcaatttgatcacctcggccacggtcacataggacacgccagcgccgccgtacgctttgggaatggtgatgccccacaggccgctggcggagaactcgtcaagctcggccactggcaggcgccgctcacggtcgcgggcgctggcctcgatggcaaagcgtgcggccaggcgcgtggcgacctcgatcgcttccgcgtccgagcggatgatatgggcagggtgttgagggtgggctgacatgggccgactccaggctccgaggggattacctgggtgattgcaggagtcgtgcctgaatgtgacagtccatgaaaccggctgattgccttgtagaaaacggagcaacacatcactgaaatcagcaaactgcctgacaagtgttgctccagcaacagtctcctgttgattaaaatgtgggactgacgcttattaaaattttaatcctcgatcgtatacacagcttctgccgagtggttaacattgttgacgatatagctggcggtagcagtcgttgcgggagaagcaaagagcgcatcaaaaagtttaaattcaagcatctggtcgatatcagtgaccgtcgcttgcgagaagaaaatccattgaccatcggtagaaacctgaacataaaccacgtccccaactgcaatccctggatacagcggtatgcagagccgtgctctgttacctgcaattgctgcacgagaaataacattgttacttgagggcacaatagagggggcagaaagcaggtcagagcgagatactagaattccgttcattaataaatcctcactaattaaagtcaaaggtgcgccctgccgtatttggtacgaatatcgattttaaaatcactgtacaaaaacaaggcaagtgaaactaaagcgcccttcaaatataaacagggaactcaaaaaagtaagctgtgaactttgacagttgacaaactaaataacgacattccgtacaaactttactgcgacgcccccatcattgcgataggcatgaggctgatggctggcaaacatgaaaaactcgcccgtaccaattgtcttgtcttcacctgccaacaccagagtcaagcaaccctcaaagacaaacagctgctcgctccagccttcaaggtctgggtccgggcagtagcgatcgccaggttcaaggcgccactcccagagttcgacttcacgccgcgccgtggccttggccagcaacaccgccttgctgccgggaatttcaccggcccaggccagctcattgatacggctatggtcacgcacatccggcgcctggatcaggtcgctgaacgccacgtccaacgcttcggccacgcggtcgagggtggacaagctgacgttcttttcgcccgcctcgatggccactagcatgcgccggctgaccccggatttttccgagagcaaggtctggctgaggtcggcggcatggcgcaggcgacggacgttctggctgacgtgctgcaggaccgaagcccggtggggattttctttgtgcactatattgctcaatgggtgggtgtgcgcagtatactgcccagcgtgcggcgcattgtgcggtccgtgcctttcccttgcaagaccgagccgccatgaccaccccgaacgcctcccctcgtttcaaccgtttcagcaaagccgagtgcatcctggtggtgatcaccatgatctggggcggcacatttttgctggtgcagcacgcaatgacggtcagcgggccgatgttttttgtcgggttgcggtttgccgccgcggcgattgtggtggggttcttttccttgcgcacgttgcgcgacctgacgctgttcgaattgaaggccggagtgtttatcggtgtggcgatcatgtttggctacgggctgcaaacgattggcttgcagaccatcttgagcagtcaatcggcgtttatcacggcgttatatgtgccgttcgtaccgctgttgcaatggctggtgcttggccgtcgcccggggttgatgccgagcatcggtattatgctggcgtttaccggcttgatgctgctgaccgggccggcgggggcttcgctgaatttcagtcccggtgaaatcgccacgttgatcggtgcggtggcaatcgcggcggagatcatcctgatcagcgcctttgccgggcaggtggacgtgcgtcgggtgaccgtggtgcaactggccacggcgtcgttgctgtcgttcctgatggtggtgccaatgggcgaggcgttgccggggttttcgtggttgctgctgttcagcgcggtgggcctgggcttgaccagtgcggtgatccaggtggcgatgaattgggcgcagcaaagtgtttcgccgacccgcgccacgttgatttatgccggtgagccggtgtgggccggcgtggtcgggcggattgccggggaacgcttcccgccgatcgcgatggtgggggcggcgttgattgtgttggcggtgattgtcagcgagatgaagaccaaggggcagaaggccctggaattgcgcgatgagagggaacaggaacagcagggataaggtccgagtacttgcagtggctgtcagatcgccatcgcgggcaagcccggctcccacaggggggggcggtgtcgcttgcccgaatcgggttacctgaaacaatgccaaatgggcgatttcggcttagcttgtaggatcctgccacatcttgccgtttggtgatcgtgaaagcggcacgtatgatgcatcccaaactcccgcagattagaagcctatgtccctgatagttctactgcttctgccgttcattggcagctgtctggcggccttgctgccgcacaatgcacgtaacaccgaatccctgctggccggccttgtggccctggtcggcaccattcaagtcgccctgctctacccccagatcgcccacggtggcgtgatccgcgaagaattcatgtggttgcccagcctcgggctgaacttcgtgctacgcatggatgggtttgcctggctgttctcgatgctggtgctgggcatcggcacgctggtgtcgctgtatgcgcgctattacatgtcgccagacgacccggtgccacgcttcttcgcgtttttcctggcgttcatgggcgccatgctcgggctggtgatctccggcaacctgatccagatcgtgttcttctgggaactgaccagcctgttctcgttcctgttgatcggctattggcaccaccgcgccgatgcacgccgtggggcgtacatggcactgatggtcaccggcgccggcggtctgtgcctgttggcgggggtgatgctgctggggcatatcgtcggcagctatgacctggaccaggtgctggcggcaggcgagcagatccgcgcgcattcgctgtacccggccatgctggccctggtgctgatcggcgccttgagcaaaagcgcgcagttccccttccacttctggctgccccacgcgatggcggcccctacgccggtgtcggcgtacctgcattcggcaacgatggtgaaggccggcgtgttcctgctggcccgcctgtggccgtcgctgtccggcagcgaagaatggttctggatcgtcggcggtgccggcgccctcaccctcctcctcggcgcttactgcgccatgttccagaatgatctcaagggcctgctggcctactccaccatcagccacctcgggctgatcaccttattgcttggcctgaacagcccgctggccgccgtcgcggcagtgttccatatcctcaaccacgccacgttcaaggcctcgctgttcatggctgcaggcatcatcgaccacgaaagcggcacgcgggacatccgcaagctcagcgggctggtgcgtttgatcccgtttaccgcgaccctggcgatggtggccagtgcgtccatggccggcgtgccgttgctcaatggcttcctgtccaaagagatgttcttcgccgaaaccgtgttcatcacctcgaccgcttgggtggagttcgccctgccgctgatcgcgaccatcgccggtacgttcagcgtggcctacgccctgcgcttcaccgtcgacgtgttcttcggcccgcccgcgaccgatctgccgcacacaccccacgaaccaccgcgctggatgcgcgcaccagtcgagttgctggtgttcacctgcctgctggtgggcatcttcccggcccaggtggtcggctcgatcctcgccgccgccgcgttgccggtggtgggtggtgtactgcccgagtacagcctggcgatctggcacggctggaacgcaccgatgatcatgagcctggtggccatgtccggcggcgtggtgctgtacctgctgctgcgcaagcaactcaagcgtggtcgcttcaaatacccgccggtgatcagctacttcaacggcaagcgcggcttcgagcgcagcctggtggtgatgatgcgcggcgtgcgcaggatcgaaaaacgcatcagcaccaagcgcctgcagacccagttgttcctgctggtgctggtggcggtggtcggcggcatgatcccgatgctcaacagtggcctcagttggggcgaccgaccgaagatcccgggttccatcgtattcgtgaccctgtggctgctggcgattgcctgtgccctcggcgccgcctggcaagccaagtaccaccggctggcggccctgaccatggtcagcgtgtgcggcctgatgacctgcgtgaccttcgtgtggttctcggcaccggacctggcgctgacccagttggtggtcgaagtggtgaccaccgtgctgatcctgctcggcctgcgctggctgccacggcggatcgaagaggtgtcgccgctgcccagctcgctgcgcaaggcgcgcatccgtcgcctgcgtgacttcctgttgtccaccgtggtgggcggcggtatggcgttgctgtcctacgcgatgctgacccgccagacgcccaacgatatctcctcgttctacttgagccgcgccctgcccgagggcggcggcagcaatgtggtgaacgtgatgctggtggacttccggggcttcgacaccctcggtgaaatcaccgtgctcggcgccgtggcgctgacagtgtacgccctgctgcggcgcttccgcccttcaaaagagagcatggagttgccgccgcaacagcgccagctggcgccggacgtggccaccgacctggtcaacccgcgccaggccagcgacaccgcgctgggcttcatgatggtgccggcggtgctggtgcgcctgctgctgccgattgcgctggtggtgtcgttctacctgttcatgcgcggccacaaccaaccgggtggcgggtttgttgccggcctggtgatgtcggtggcgtttatcctgcaatacatggtcgctggcacgcagtgggtcgaggcgcaaatgagcctgcggccgatgcgctggatgggcttcgggctgctgtcggcaaccctgaccgggctcggcgcgttgttcgccggctacccgttcctcaccactcacacctggcatttcagcctgccgctgctcggcgacatccatatcgccagcgcgctgttcttcgacgtcggcgtgtacgccatggtcgttggctcgacgctgctgatgctcactgccctcggccaccagtccgtgcgggcccataaaccgagcaaccaggccaaagtggttgccgcaacggaaggagccgcctgatggaagaagtcatcgcaattgccattggagtcctggcggcttccggcgtctggttgatcctgcgaccacggaccttccaggtggtgatgggtctgtgcctgctgtcatacggggtcaacctgttcattttcagcatgggcagcctgtttatcggcaaggagccgatcatcaaggacggcgtgccgcaagacctgctcaactacaccgatcccctgccccaggccctggtgctcacggccatcgtgatcagctttgccatgaccgcgctgttccttgtggtgctgctggcgtcacggggcctgaccggcaccgaccatgtggacggccgggagcccaaggaatgaattgggtgaatcaactgatcgtcgcaccgatcctgctgccgttgctgaccgccgcgctgatgctgatgcttggcgaaaagcgccgcccgctcaaggcgaaaatcaatctgttctccagcgtcatcggcctgggcatcgccatcctgctgctgtactggacgcaaaaaggcggcccaggctcgattggggtttacctgccgggcaactggcaagtgccgttcggcattgtgctggtggtggaccaactgtcggcgctgatgctggtgctcaccgggatcatcggcgtaagtgcgctgctgttcgccatggcccgctgggatcgcgcgggcaccagcttccacgcgctgttccagatccagatgatgggcctgtacggcgcgttcctgaccgccgacctgttcaacctgttcgtgttcttcgaagtgctgctggcggcctcctatggcctgatgctgcacggctccgggcgtgcgcgagtgtcgtcggggctgcattacatcgcgatcaacttgctggcatcgtcgctgttcctgattggcgcggcgatgatctacggcgtcaccggcacgctgaacttcgctgacctggcgctgaaaatcccactggtgccggaggctgatcgtggcctgttgcacgctggggcggcgatcctggcgacggcgttcctggccaaggccggcatgtggccgctgaacttctggctggagcccgcctactcgtcggcgagtgcgccggtggcggcgatgtttgcgatcatgaccaaggttggcgtgtacaccgtgctgcgcctgtggaccctgctgttctccagccaggccggggcgtcggcgctgtttggtggggattggctggtgtatggcggcatggcgaccatcatctgcgcggcactggcgatggtcgcggcgcagcgcctggagcgcatggccagcttgagcatcctggtgtcggcgggaattctgttgtccgcagtggggtttgcccagccaagcctgacggcgggcgcgctgttctatctggtcagttctaccttggccttgagcgcgctgttcctgctggctgaattgatcgaacggtcacgctcggccaatgacctgccgctggatgaagagatcgatgcgctgcccaaggccatggaatccctgcatccgcgccctggcgtcaacctcgatgacgagcagcaagccgtggtcggccaggtgatcccctggaccatggcgttcctcggcttgagctttattgcctgtgccctgctgattatcggcatgccgccgctctccgggtttatcggcaagctcagtctgttgagtgcgctggtcaatccgctgggcctgggcgtcagtgttgacgaaccgatccgaccggccgcctggggcttggtggcgctgctgattctctccggcctggcctcgctgattgccttcgcacgcctgggcatccagcgtttctggacccctgaggaacgcccttcgccgctgctgcgtcgctacgagtgcttgccgatcttcttcctgctgggcttgagcatcctgctgaccttcaaggccgagccgctgatgcgctacacccaggccaccgccgtcagcctgaacaacccggaacactacgtgatggcggtgatggcgacgcggccggtggcgagtcctgaagccaaggctgccgcactggaggtacagccatgaaacgactgttccctgccccgtggttgtccctggcgttgtgggtgttgtggctggtgctgaacctgtccgtcagccccggcaacctgctgctgggcgcgctgttgggctttctcgcgccgctgctgatggcgccgttgcggccgttgcccatccgtatccgccgccctggcgtgatcatccgcctgtttttcctggtgggccgcgacgtgatcgcctccaacctgcaagtggcctggggcgtgctgatgtgtagctcccgcccgccgcgttcgcgcttcatcaagatccccctggacttgcgtgatgccaacggcctggccgcgctgtcgatgatcaccacagtggtgcctggcaccatctggtcggaactggcgctggaccgcagcatcctgctcctgcatgtgtttgacctggaggatgaagcgtctttcatcgagcacttcaagtccgcctacgagcggcccctgatggagatcttcgaatgagcgccctgctcgccaatgcgatcctgttcagcctgttcctgttctccctggccatggtgctgaccctggtgcgcctgttcaaaggcccatcagcccaggaccgggtactggcgctggactacctgtacatcctggcgatgttgatgatgctgacgctgggcattcgttatgccagtgacacctactttgaagcggcgctgctgatcgcgctgttcggcttcgtgggctcgtttgccctggcgaaattcctgctgcgtggggaggtgattgaatgatgccgttatggatggaaatcgtcgtggccgtgctgctggtgctcagcagtgtatttgcattgattggcgcgatcgggttgctgcgcatgaaggacttcttccagcgcatgcacccgccggcactcgcatcgacgctgggagcgtggtgtgtggcgttggcgtcgatcatttatttttcggtgctcaagtccgggccggtgttgcacgggtggctgattccgattctgctgtcgatcaccgtgccggtgaccacgttgctgttggcgcgcacggcgttgttccgcaagcgcatggctggcgatgatgtacccgccgaagtcagcagccgccgttgatccctatagaaaacacggtcaaaactgtgggagggggcttgcccccgatggcggtggatcagtcagcttacctgtagctgacccactgctatcgggggcaagccccctcccacatttggattggcgctaggcaaaagacctgatgtgcgccgccaattccgccaacccctcatcatcggcccgcacatgatcgtgggaggagatgtacccttcatatgcctcgaagaacttgtccaccttcgaactcagcggcttgaaggtactgtcgccgccggtcccatgcatgggaaacagcttcgcatgcaggtgatccaccccatacccttccaggatcatcccggtgcgcgccacatcggaaaacgcacggtcgatctgctgtgcggttttctttgcggcgacggcgagcccggccaacacttcatccgactgtgcaaacgcatagctgccgtaatgctgcttggggatcaccacgctgaaacccggggtgttggggaagatcgataagaaggccatgtgctggtcgtcttcccacaggatgtgcgccggggaagtcttttggacgatgctgcagaaaatacacgtcattcgagtctccatcagtggttcttggtggccttcaaatagcacaacttccattacaagataggcgagccaaacctgcgaaaccgcggcatccaatcacccagaatctgcgccgacgccagcacatgatgcgcccgcccgatcaacagccggcgtggcacaacgccgatgtaccgggaatcatcgctgttgtcgcggttgtccccgagcatgaaatagctgtcggccggcaccaccagcggcccgaaactgcgcatcgctcgcaccgtcggcatgaactgcaccgtgcgctgccggttggccgccaactcgttcagcttgattcccggcaccgcatggccgggaacgatgggctcgctgatgtcctgcgcatcactgtaggtggcaggcacgccgttgacccacaacacctcatctttcatttccagggtgtcaccgggtatgccgacgatgcgcttgatcaggcgcatgccgtccttgggcgacgagaacgttaccacatcgccacgttgggggttatcgagctgggccagggaaatgtccgtgagcggcagcttgaggtcgtaggccacacgattgaccaacaccacatcgccctccagcaaggtcgggcgcatggagccggagggaatgggattccagtccgccagggaggtgcggaaaacgccgaagcacaaccagaaaatgattgcgtaacggtaacggatcaaccaacttcgcatacatcctcgcacggcagacaggggcatcagggctgtttcccagacgcccggttgtttcacgcgaggattaaatcaacattagcgtccaagcgcacaaaaaggagttttcgccatggatatcaaatgttcggtgtttatcgccgccagcgtcgatggcttcatcgcccgcccggacggtgatatcgactggttgcaccggccggagtatgaaaccgccaagttgaacggtgtgacttacgaaagtttcatcgccacggtggatgcactggtgatgggacgcaagaccctggagaaggtactgtcctttgcggagtggccctatgagggtacgccggtcattgcgctcttccatcagcctctgcaaatccctgcgcatctggagggcaaggtcgaggtcatggcaggagacgtcacctcactcgtggcaacgttagccgagcgcggcatgaagcacctctatatcgacggaggccagacgatccaggcgtttcttgaagcgggcctgatgaatgagctgatcattacgcgtatcccggttttactcgggcaagggatcccactcttcagccagatcggtcgagaacttgagcttcgccatatcggcacgcatgagtcggacaatggttttgttcaaagtcggtatcaagtgatgcaatcttcatagcggcggcagacactcacatcgcgcaagacggacagggggtcaggatgactaagcacattattgttatcggcggcgagtccaccgaagacatgcagcgtatgacgcgtatcgataaacatatcgtcgcgtcatcaggcaaaacgcaccctactgtgctctacatctctaccgccaatggcgatgaccgaatcaagatttccgatttcaccaccaaatatgaaagcgctggctgccgtgtaaccgcgctggcatttttcatttcacccttccccaacgccaatcatgtttcatcactctttgagcaagccgacattatttacgtaccaggcggaaatacccgcgcgatgttggcgatctggcgcgaatttgctgtagtggaccatctgaagaggtcctgggaaaacggcaaagtcctgtgtggtgtcagtgcaggcgccatttgctggttcgagcatgggcattccgattcagggggagtgtttgcgctggttcacggcctgggcttgctgccaggagcactgtgtccgcatttcagctcagaagcaggaagggaaacctcgtttgtcgagcttgttcagcgtgagggtatacaacctgcctacgcggtcgatgatggcgtcgctttgcatttcaaggacggcgagtatcacgagaccatctataacgacacagccaatagcgcctataaagtcagtacaaggccaccctacctagtacagatattgcgaacttcaggcgggtaagcgccgctaggaaatttccgacagcgttttaaggttttcgctcggaagatggctgcctaatcttcggtggtcgctgcaaattcagcgaccgggtttcgcagcccggttaaactctagacgcacagcgtccacctcagatagcgggcgcttttttatgcctgatgttatggcggctgtgcgcgggataccttcgggtatgccgggtgcctagagtcccggtctgcgaacctgcgtacagctgccacccgaatgtcgtttcgcagcgatgggtggtggctccaatactctaggagctttgccatgattaaagacagtccgaatccgccattagactcagccgcgtttcatactgcggctcatcgagcaattaaccactatctgaatccacctgagaaaccagagccttctactgaggaccatagtttatttactgtacgcgaaggattagacatcgagacgctgctggtcaacgcgtcggaggatcttgcctcggttcaagcgctggcaagccatttggcttttgagatcgacggcaatcctcgcagcgtggccttgggaatgtgtcggatgctggaggggatacagctaatggtggataaaacactaagcctcaaagaccatccaactcacacataaatctgaaaccgaagagttcgcaaagtgggcacggtaaaaaatgtgggagctggcttgcctgcgattgcggtgggtcagtcaacatttccggtgactgacacgccgtcatcgcaggcaagccagctcccacagtggatcgagtgaaacgttaaaccgatgtgcaaaaaaaacgccccgaaccagtcggggcgttttcattcagcgtttaccgatcaagcctgatccgccaaccgccacgtcgtcccacccttcccgtcttccaacaccacacccatcgcggtgagttggtcgcggatacggtcggattccgcccagtccttaccggcacgcgccgccaggcgcgcctggatcagcgcatccacctcagccgcatctacacgcccttcggcgccggcttgcaggaagtcctcaggcttcatttgcagaaccccaagcacactggccagctctttcaggcgcgccgccaggccggccgctgcgtcgaggtcgctctcgcgcaggcggttgatctcgcgcaccatctcgaacagcacggcgcaagcttctggggtgccgaagtcgtcgttcatcacttcggtgaagcgggccacgaaggcttcgccgccggccggcgctacggtcggcaggcctttcaacgcatggtagaaccgctccagggcgcccttggcgtccttgaggttgtcttccgagtagttgatggcgctgcggtagtggctcgataccagcaggtaacgcaccacttccgggtggtacttttccagcacgtcgcggatggtgaagaagttgttcaaggacttggacatcttctcgccattgatgcggatcatgccgcagtgcatccaggcgttggcgtaggtcttgccggtcgcggcttcgctctgggcgatttcgttttcatggtgcgggaactcgaggtcgctgccgccgccatgaatgtcgaaagtctcacccaggcagcaggtggacatcaccgagcattcgatgtgccagcccggacgcccggcgccccatggcgactcccagctcggctcgccgggcttggtggctttccacagtacgaaatcgagcgggtcctgcttggcttcgtcgacttcgatacgcgcgccgatgcgcaggtcttcgattttcttgcgcgacagcttgccgtagcccatgaacttggcgacgcggtagtacacgtcgccattgcccggcgcataggcgtaacccttgtcgatcagggtctggatcatcgcgtgcatgcccgggatatggtccgtggcacgcggttccatgtcaggcttgaggatattgaggcgggcctcgtcctcgtgcatcgcggcgatcatgcgctcggtcagcgcgtcgaacgactcgccgttttcgttggcgcggttgatgatcttgtcgtcgatgtcggtgatgttgcgcacataggtcaggtcatacccactgaaacgcaaccagcgggtcaccaggtcgaaggcaaccatgctgcggccgtggccgatgtggcagtagtcgtacacggtcatgccgcacacgtacatgcgcaccttgttgccgtccagcggcttgaagacttctttggtcttgctgagtgtgttgtagatcgttaacacgacaattcccttaagacagaatcactgaccccacgaatcacgcaaggtcacggtacggttgaataccgggcgacctggtttcgagtccttgatatccgcgcagaagtaaccttcgcgctcgaactggaaacggtcttccggctgtgcgtcgccaagcgatggctcggcacgacaacccgtaagtacttgcagggagtcagggttgatgttgtcgaggaaactcgcgctgtcttcggccttttcagggttcggcgagcggaacaggcgatcgtacagacgcacttcgcactcgatgctggcggccgccggcacccagtggatcacgcccttgaccttgcggccttcggggttcttgcccagggtgtccgggtcgtacgagcaacgcagttcgacgatgttgccatcggcgtccttgatcgcttcgtcggcacggatcacgtagctgccacgcaggcgcacttcgccgttcggctccaggcgtttgtagccttttggcggctcttccatgaagtcatcgcggtcgatgtagatttcacgggcgaacggcagcttgcgcacgccgagttcttctttctgcggatgacgcggcagctcgaggttatcgactttgtcttccgggtagttggtgatcacgactttcaacggacgcagcacgcacatggcgcgtggggcgttggcgtcgaggtcctggcggatgctgaactcaagcatgccgtagtcgaccacgccgtcggaacggttggtgccgaccatctcgcagaagttgcggatcgacgcaggcgtgtagccacggcgacggaagcccgacagcgtcgacatgcgtgggtcatcccagccatgcacatgcttttcatcaaccagttgcttgagcttgcgcttgctggtgatggtgtagttcaggttcaggcggctgaactcgtactgacgagggtgcgccggcaccggcaggctgtcgaggaaccattcgtacagcgggcgatggctttcgaactccagggtgcagatcgagtgggtgatgccttcgatggcgtccgactgaccgtgggtaaagtcgtagttcgggtagatgcaccacttgtcgcccgtctggtggtgatgggcgtggcggatgcggtacatgatcgggtcgcgcaggttcatgttcggcgaggccatgtcgatcttggcgcgcagtacgcgggcgccgtccgggaactcaccggcgcgcatgcgggcgaaccagtcgaggttctcttcgaccgaacggtcacggaacgggctgttcttgcccggctcggtcaggctgccacggtattccttggcctgctccggggtcaggtcgtcgacgtaggccttgccggccttgatcagctcgacggcccagtcgtgcagttggtcgaagtactgcgaggcatagcgcacttcaccggaccattcaaagcccagccatttcacgtcgctttcgatggcgtcgatgtattcctggtcttccttggccgggttggtgtcgtcgaaacgcaggtgcgtgacgccgccgaattcctgggccaggccgaagttcacacagatcgacttggcgtgaccgatgtgcaggtagccgttgggctctggcgggaagcgggtgacgatctgcgtgtgcttgcccgaatccaggtccgcctggatgatcgggcgcaggaaattgaccgggacggcaggtccggccttggaattcgaggtagggtcgacagtgggcttgctcataggatccttgaacagacaagtacgtggccgggctaggccgacaaaacaaagggcttatcatagctgatgctgtcaagccgctgacagggttgcggtgcatttaacgcaccagtggtaaaaaaccacctcgaaattcctgcaggtcacgctaaactgcgcgccttggccgcagtttcgccataccggtcgtggtgcccaggcacccaaatccacgaattccctgaaaagagtagtgaacatgactcaagtcaaactgaccaccaaccacggtgacatcgtcatcgagctgaacgccgagaaagcgccgatcaccgtcgccaacttcatcgagtacgtgaacgccggccactacgaaaacaccgttttccaccgtgtcatcggcaacttcatgatccagggcggcggtttcgagcctggcatgaaagaaaagaaagacaagcgcccaagcatccagaacgaagcggacaacggcctttccaacgacaagtacaccgtcgccatggcccgtaccatggagccgcattcagcctccgcgcagttcttcatcaacgtggccgacaacgccttcctgaaccacagcggcaagaacgtgcagggctggggctacgcggtattcggtaaagtcaccgaaggccaggacgtcgtcgacaagatcaaaggcgtgcagaccaccggtaaagccggtcaccaggatgttccggtagaagacgtgatcgtcgaaaaagccgagatcgttgggtgatattgctgatttcagatttgcatctggaagaggagcgcccggacattacccgggcgtttctggatctgctccacggccgcgcccgtggcgcccaggcgttgtacattctgggggacttcttcgaagcctggattggcgacgatgggatgacacccttccaacgctccatttgcgcagccctgcgcgaactgagcgacagcggcaccccgatttttatcatgcacggcaaccgcgatttcctgatcggcaaggcgttctgcaaagccgccggcgccagcttgctcaaggacccgagtgtcgtgcagctgcatggcgagcccgtgctgttgatgcacggcgacagcctctgtacccgcgacgtcggctatatgaagctgcggcgcatcctgcgtaacccgatcgtgctgtttatcctgcgccacctgcccttgggcacacgccacaagctggcgcgcaagctgcgcagtgaaagccgtgcgcagacacgcatgaaggctaacgacatcgtcgatgtaacgcccgaggaagtgccacgggtgatgcagctgttcggcgtgcgcaccctggtccacggccacacccaccgccccgccattcacaagttgcagattggcgaccaggcggccaagcggattgtgctgggggattgggacaagcagggctgggcgttgcaggtggatgagcaagggtttcagttggcggcgtttgattttgtgaacccgcaactggcactgcccggcgcataaaaaatgtgggaggggcggtgcgacgattcgacttgcccccgatggcggcggaagactcaacatatttgttggctgaaccactgctatcgggggcaagtcgaatcgtcgcaccgcccctcccacattgaattgtatttcgatctttactgatcagtgcccggaagctgccggccccgctttggcggtaaacggcggcttcgccagccataccagcagcatcaaccccatgaacatccaccccagcaacgtgaagtaatccacggtggacatcatgtacgcctggctggtgaggatctggtccagctgcgtgtaggccttctgccctgccccaccgagcgcctgcaaggcatcgcgggtcgccgagtcgtaggtggtcatgttctcgctcatgtacgcatggtgctggtccgcccggcgaatccagatccaggtggtcagcgacgccgcgaagctgccgcccagggtacgcaggaacgtggccaggcccgcgccgtcggcaatctggtgcggcggcaggtcggacatcaagatgctcaaggtcggcatgaagaacagcgccacgccaatccccatgaacagctgcaccagggcgatgtgctggaagtccacctcattggtgaagcctgcgcgcatgaagcagctcaagccaatcgccaggaaggccaggcccgccagcaggcgcaggtcgaacttgtgcgcgtacttgcccacgaacggcgacatcagcaccggcaaaataccaatcggcgccaccgccaggcccgcccaggtcgcggtgtagcccatctgggtctgcaaccactgcggcaggatcaggttgatgccgaagaagcctgcgtaccccaggatcaacacgatggtgccgatgcggaagttgcggtaggcaaacagcttcaggttgaccaccgggtgtttgtcggtgagttcccagatgatgaacaccgccagggcaatcaccgaaatcgccgcgcccacgataatgaagttggattcgaaccagtccaggtcattgcccttgtcgagaatgatctgcaaggcgcccacgccgacgatcaagctcagcaacccgacgtaatccatcggctgataactggtctgcaccggacgtttcttcaactgcgaacgcaccaccatcaccgcaaagataccgatgggcacgttgatgaagaaaatccacggccagctataactgtcggtaatccagccgccgaggatcggcccggcaatcggcgccaccaccgtgaccatcgccagcaacgccagggccatgccgcgcctcgccggcgggtacacggcgatcagcagtgtctgagtcatcgggtacaacggcccggccaccaggccttgtatgacgcgaaaagcgatcagctcgggcatcgacgtggaaataccacacaggaacgaggccagtacaaacagcatcgtcgcccacaagaacagcttcacctcgccaaaccgccggctcagccaaccggtgagcggcaaggcaattgcgttgctcaccgcaaacgaggtgatgacccaggtgccctgctccgaactcacgcccaggttgccggaaatggtcggcaacgccacgttggcgatggtggtgtcgagcacctgcataaaggttgccagcgacaggccaatggtggccatcaacaggctgggtggcgtgaaggaggcgttattgctcatcagcgttgcacagccttgggcgcggcgaggctgttgtcatggatcaactgggtgatcatggcgtcggcctcggcgagttggcggtcatacacgttggtgctgaacgaggctttctgcggcgcctgttgcgccagtaccgggccgctctggtcatgcaggtcgaccttgaccagggtgctcaagcccacgcgcagcgggtgcttggccagttcttcggcattgatgtggatacgcaccggcacccgttgcacgatcttgatccagttacccgtggcgttctgcgccggcagcagcgcaaacgcgctgccggtaccggcgccgaggctgtcgatggtgccgctgaatttcacgtcgctgccgtagatgtccgactcgatgtccaccggctggccaatgcgcatgtcacgcagttgggtttccttgaagttggcgtcgatccacagctggttcagcgggatcaccgccatcaaggcggtgcccggttgtacgcgctggcccaattgcacggtgcgcttggccacatagccggtgaccggtgcgatcaaggtgctgcgcgcattggccaggtaggcctggcgcagttgcgcggcggcagcctgcacgtccgggtgggagctgatcacggtgtcatccaccagcgcgttggtggttttcagttgctgctcaaggttggtcagggcgtttttcgcggcagtcaggctgtcacgggcgtgggacagttcttcctgggaaatcgccccgccctgggccagggttttacgtcggttgaagttgtcctgggcagtctgcacgtcggctttctgcgcattgacctgggccttcatgccgtcgacgttgctgtacaaaccacgcacttggcgcacggtgcgcgccaggttggcctgggcactttgcaggcccactgcggcatcgttagggtcaaagttgatcagcacctggccttcgtggaccaggtcgccatcgtcggcgccgatgctgaccacggtgccggtgaccagcggggtgatttccaccacgttgccgttcacgtaggcgtcgtcggtgctttcgctgaagcggccgtagagctcgtaccagccccacacgccgaccacgacgaggatgacgatcagcgccaggccgatcagcatcactttgcgtttgcgtgggttgttgtctttgggttgttcggttgcgttggtgttttcggcagtggccatgacaaatacctcaaattattccgtgcgtgtagctggggtggccgctgccacgttgtcggcgctgtagccgccgcccagggcctgcatcagttgaatcgacagatcgatctgcgcggcattcagggtcgccagctgacgctgggcctgcagcaattgctgctcgatgctgagcacatccaggtagttaccgatcccggagctgtagcgctgcacgccggtgtcgtaggactgctgggcaatgtccgcggcatgttgctgggcctggatctgccgaccggtgtcgcgcagttgcgaaagggtgttgccgatatcgcccagggcttgcaccagggttttgttgtattgcgccacggccaggtcgtagtcggcgtcgcgggcgtcgaggtcggcacgcaggcggccgccgtcgaagatcggcagcgagatcgtcggcgcaatgttgaagaagcggctggccgagccaaacatcgcatcgcccagtaacgactcggccccggcgctcgcgctcaggttgaggttggggtagaagcgcgtcttgctggcgtcgatattgcggcccgccgattcgacccgccagcgtgcggcgatcaggtccgggcggcggcccagcagctcggccggcagcaccgagggcacggcgacagcgctgggtttcagcacgttgggccgggccagttcactgccacggtccgggcctttgccgagcagcacggccagggcgatcttggcgctttgcagttgtttctctgcgtcgatcagttgcgactgagagctggcttccaggctttcggtctgctggtactggtactggctgtcgatacccgaattcagccggcgtttgctcaggtcgagcatctgccgggtacgcttgaggtcatcgttggccaggtcgcgcacgatatgggcctggcccaggtcgctgtaggccttggccacgttggcggccagggtcaggcgcgcggcctgctggtcgacctgggcggcacgcgcttcgcccaacgcggcttcccaggcagcacgctggccgccccagagatcgaaggtgtagttgaagctggcgccgatattgcgcacggtcgagtaggcatcgccctgcccgcgtgggtcctggtctttggccaggcgtgagcggctcacaccggcgctggcatccagggtcggcaggcgcgctgcgtcggcggcgtaggcggcggcttcggcctggtgggcacgggcgctggccacttgcatgtcgggactgttttgcagggcttcccgaatcaagccatcaagctgcgggtcaccgaggcttttccaccagtcggcggtcggccaggcagcgctcgacagggtcacgccgctcaaggttttaccggtttgcaatgtgctggcgtcgaggcgtttgccttgggtgtcgaggccgctgtagttggcgcaaccggccatgttcatggccaccagcaccaggctaagtgcgcgtatgttcattctttacctacccgctggatgacgatggcgtcaccggcagctatcagaattttcttgaggatccgctccagggtctgcaactcgccgggctccagggcgccggccagttcgttcatcgactgggcgccgatgtgcggcagcatgtccgccaggcgctggccgtcttcggtgagcaccaagcgcacctggcgccggtcctgctcggaacgctggcgtgccagcaatcccttttgttccaggcggtcgagcatgcgggtcatggagccgctgtccagggacaggttgcggcacagctccgccggggtatccacatcgaactgggcgatgatgatcaacaccttgaactgcgcagcggtcacgccgtgcggctccatatgggtgtcgataatgcggtccttgagcagcgccgcgcggcccaggagcaggccgaggtggcagttgcgaaaactgtcaggagtgaagtgagacatcggaagtcaccttattactgcctaggcagtgaatgtgtgacaagatgttactgcttaggcagcgaatgtcaaatggaattattagcttgcttggtagttggcggatgagtggtggggttctaaggattgcctgatggggtgtgacgccttcgctgagtaatctgcgtagccttttggccagtcgacactctccttcccatgacttctttaaaacagtttactcgcctcgcggtcatcaccctggcgggcgcgccagccgcttttgcggctaattgcacagccaccatcaacaccaacgaagcccttaatttcggtgcaagtctggccagtggcagcctgacagttcccgctgatacgcccgacggcaccgtgatttaccaggacacggtgcaatccgctcaaaacagctggagatgcacgggctcttcgcaatacggcctggtgatgaaccctacgctaggctcggtcaccagcggctcgacctaccctatcggcaagaccgggctttcgttccgcgtctggatcgacactctgagtcgctatgagactgcaccgtttacgctcaagccggatggttacggcatcaacccaggctcggtgcgcctggaaatcgtcaaatcaggtacgctggcgccgcaggtcaagatagcggccggaaacctgggcagcttgaaagccgacgacctgttcatcagcaagtacaacctgaccaacccgctggtgctgaacgccgcctcctgccagaccccttccgtccccgtcgccatgggtgacgactatcagctctgggaatttcgcgacgcaggcgcaacccctcgcactgtccgcttcaacatcggcctgaaccagtgccagaccggtatcaacaaagtcagctattcactcaaagccaccacgcccgtcatcgacgcggccagaggtgtggtggcgctcaacggcggctccaccgccaaaggcatcggcctgcaattgatggatgatgccgggcaacccatcgcgtttgataccacctactccttcagcggtttcaccaccacgggcgccaacttcaagatcccgttgtcggcctcgtattaccgcttgcccaccggcaacgtcgaggccggcagcgccaacaccgaagtcacctttatcgtgaactacctgtagcaaactaaggatcgtctgatttttcctacgcccggccacgcctagagtgccgggatgcgattaaagaactatctccaccagatcagccccgtcctgtccacgccccatgccgcacgccgcttgttgcgcatttttgcgctggtgctgctggtgggcatgctgggcggtgtgtacagcttcctgctgtttacgttcaacaacgagatctctcagcggcgcagctacatgagcagcgccatcgccgaggcccatacctttttcaccacccgtgaagccctgctggaaagcctcagcctgtcggccacacgcaaggccgaatcgaacctggcgatgaacgatgaggaaatccgcctgttgctcggcaaaatcccgggtaagcaatggagcatctggctgacccagcgcatgcgcgacttcctgaaggccaagcagctcaacctgctgtatgtcggcaccgatgcccaggtgctgcggctgtacgatgcgggtcccgcggccgccggctttcccgcgtccatgctggcgcaactcaatgccctcaagcagcagaaaaccctgcaggaactctggctgactcacaccgacggtggccattcgcagctgtacatctttatccgcctggatgaacgcgacctgaactccggctggctcggcctggagatggatgaccgtgaagtctccaactccttgagtgaccacagcgccggcgagttcaccatgttcaatgcccagggcatgcctctgttcagcaacagccgcaacccgccgcccgggcagaacctgccgcacctgcgccagcaggacttcttcggctttgtcggcgacggctggctgcccgagcaattggtgttgcgcaaacaactgaagtcgtcggactggcagctcacctactccatcgacctgcgcgcggtgctctgggcgctatggccgcagatgctcggcgccctgctgttctgcctgctgaccatcagcctggtgggcctgctgacccgccgcctggaacaccgcttcatcacccccgccatccatcgtatccaggcgctggtggaaagcgagctgttcagccgcgacgtgatccagaccgcccccgtggccctgtgcgtgctgcggcgcaccgacggcgaagtggtactggaaaacaccctggcccaacaatggctcagccacgccggcgcagagctggggccgggctggattcgtgacgccttcgatacggacaccccctgccttaccgactacttcgagactgccgacggtcgccacctgtacctgagctgtgcacccacccgctacaagggggaagacgtgttgctctgcgccttcagtgatatcagcgcacgcacccagatcgaagcggcgctggaacaggcgcgccaatctgccgatgccgccaacgaagccaagacactgttcctggcgaccatgagccacgaaatccgcacgccgctgtacggcgtgctcggcaccttggagttgctcgcccggacccgcctggatgcccagcagaaaagctacctgcatgccatcgaaggttcctcggcgacgctgctgcaactgatttgcgatgtgctcgacgtgtcaaagatcgaagccggtcaattggccctggagttgagtgagttctgtgtgcccagcctggtgcaggaagtggtgcagggttacgccgcagcggcgcagagcaagggcttgcagctgtacgcgtgcctcgacccgcaactgccgtcgcgcctgatcggcgacgccagccgcctgcgccagatcctcaacaacctgctgagcaacgcggtcaagttcaccgactccggacgcgtggtactgcgggtcaaaaagctcagccgtgaaggcgaacgggcgtgcctgcaatggcaagtctcggacaccggtaaaggcatcgcccaggaagaccaggcgctgatcttcgagccgttctaccagaccgaaggcaacccccatgtgatcgccggcaccggcctcggcctgcccatttgcctgcgcctgacccacttgatgaacggcaccctgcgcatggtcagcgagccggggctgggcagcagtttttccctgaccgtgccgctggagcaacccactggtatcgcgccgtcgctgctggcgcaggaggtggtgtatgtgctctcgcctgtgcgcgaactggccgacagcctctgcggctggctgcggcgctggggcgcccgcgcgcaggtcggcccgccgtccagcgccgagctggccccacccgcggtgctgctggaactggttgagcgcagcctggacacgccctggcacggcccacgggtcctcgccagcatcgatggcgcccacgagccgcagttcagcgaagagggctggcaggtcaacctcaacgacctgaacgcgatccaccaggcggttcgccacgcccagaacggccaggccgcgccggcccaggcacgttgcgaacggcgcgacctgcaccccttgcacctgcatatcctggtggccgaggacaatgtgatcaaccagttgatcctgcgcgaccagcttgaagaactcggctgcaccgtagaattggccagcgacggtgaagaggccttgtcgcgctggcacgaaggcgccttcgacatcgtccttaccgacgtcaacatgcccaggctcaatggctacgaactggccgaagccttgcgacgcctgggctgcaacaccccgatcatcggcgccaccgccaacgccctgcgcggtgaagatgccttgtgcctggcggccggcatgaatcactgcctggtcaaacccttcacactgcgagccttgttcactgccctggctccctacgcacgagccacccatgaagccctgtagcattttgatcgttgaagaccacccgtttcagcacctgtatttgcagaacctgttcagcgagttgggcgattttgacgtggtctgcgccagggacggtgaagccgcgctggcctgcctgaaacaacgcgacttcgacctggtgctcactgacttgctgatgcctggcatggacggcgtgcaatttatccagagcctggccgctcaaccctcgcggcccgcgctggcgatcatgagtgccgcatcacgccgcatgctgatgggtgcgagcctggtggcgagcaacttgcaagtgaaggtgatcgggttgatttccaagccggtgaatgccgccgccctgcgctgcctgatcgaccagttgcaggcgctgcgccaagtcgcaccggcccagacccagcccggcatcgattgccaaagcctgatggacgccctggacaacggtgaactgcacgcctggttccaacccaagaaagccctgaacaatggtcgcatcgtcgcggcagaagccctggtgcgctgggtgcaccccgagcatggcctgttgctgcccggcgtattcctgccggcattgatcgcctgccacctggaagaacgcctgttgtggtgcgtgttgaaacaggcgatggccgcccaagccatgtggcgccaacacggctatgacatcccggtgtcgatcaacctgcccacgcacctgctcaacagccacgacctgcccgaccgcatcctcgcgttcgtgctggaacaccagggtttgcccgcacgcctgtgtttcgagctgatggagtgctcggtgcccgatgacatcagcaatttctacgccggcgcctgccgcttgcgcatcaagggattcggcttgtcccaggacgatttcggcaagggctacagctcgtacatgaacctggtgtcagcgccgttcaccgaggtgaagatcgaccgtgcgctagtgcagggctgcaacgccaacgaagaattggcccaggccctcaccagcatcgtcagcctggggcgtcaattgggcttgatcgtggtggccgaaggtgtagaaaccgcgcaagaacttgcgctgttgcgtaagatcgactgcactcaggtccagggtttcctgatctcccacgccgtctctgcggatcagttccagcaattgctgacccacgacgggccggcgagcgcctattgacccggctgccgggtgtggaacaacaccgttagcttgcgaggtcaccgcgtcatgcatcaccccaatgccttcctggagaaactcaccagcagttcactgcgcctgaacaaaggcttgctggtactgggcgcattggcggtgctgctgctgggtatcagctacctgggagtgcagcgcatggtcaaggagcagcatgaaaccctgcaattccacttcgcccggctgatggaaaatatccacgagcaggaagccttcctgcgcgatgtctcgcggggcagtctccagggcgaactcaacccttcggccctgctcccacccgttgtgcaaaagccgctgcccgaagaagggccgaatatctatgagggtcgcgggctaccgttttccctgccctacagcttgaaaatcaacccggacaagatcaccaccgcccaataccccaaggtgttcgctctcggcacctacttgtcggcttactacagcgcgttctgggccgcctcccactatcagtcgccccaggtgatggtgatcaacggcccggacaacttcgacatcagcgtgcccgccaccggccggctgcgcgatggcggccaggtgccggtcggcgcgctgctggacgtgctgacccagttgaacgcgcgcctgcacgcacagaattcgtcgctggcggatcatcaggtgcactgggaaccctacgaccccacgcccgatgacaacgctgcgcccgtgctgctgggctatgtcgacatcaacctggcctcgaccgcgctggccatcgacggcgccaacacctgggtggtggtggcttcgctgctggacctggccaaggtgaataacatcgagcgcttgatgcagtggtcgatctacgacaacttcaccttgatcacccctgccggggttgtcctgaccggtgcagtgaagcccggccaagtgttggccgagggcgtaaatgtcacccgcgacggcctggtgttcaaactcaccagccagggcgagcaggcgtggacggcgatctacgtgatcagcctgcaacgcttcctcgactacgcgctgtggccattgctgtgtctgctggccgtggtgctggcgatgctgggctgcggccgcgcgctcaaccgttggtacacggcgcgggtggtgttgcccgcccatcaggcccacgccagcatcgctgagagcgaggcgttcagccgtgcggtcatcgacactgcgccgaccggcctgtgcgtgatccgccgcagcgatcaccatgtgctcctgcaaaaccaacgtgctcagcaatggcaggacgcacgcgccttgttcgacttgctcaaacagcagccgcacaccacgccgggccaggccgaccttgaaagtggcggccgtcacctgcacgtggcgttcgtgcccacgcgttaccagggccaagacgcgtggttgtgcgcggtgcacgatgtcactcggcatatcgaagatgccgccgccctggaagaagcgcgccaggccgccgattcagcgaaccaggccaagagccgcttcctcgcgaccatgagccatgaaatccgcacaccgctgtatggtgtgctcggcaccttggagctgctcggcctgacctccctcgcgccacgccagcaggattacctgcagaccatccagcgctcgtccacctccctgttccaactgatcagcgatgtgctggatgtgtcgaagatcgaagccgggcaaatgaccctcgaactccaggacttctgtccgctggaactgaccgaagacagcgtgcgcacctacagcgccttcgcccgcgccaagggcttgcagttgtatgcctgcatcgacgcgaatctgccggaccgactgcgcggcgacccgcagcgtatccgccagatcctcaacaacctgctgagcaacgcgatcaaattcaccgattacggccgcgtggtgctgcgtctgcgtgtcctgcaaaccagcgatgatcaggtgagcctgcaatggcaggtcagtgactccggcgtgggaatttcccaggcgcagcaacaccagctgttcgaccccttctaccaggccgaagatgccaccagccaggccggtgccggcctgggcctggcgatctgcaaatggctgtgcgaactgatgcacggccagctgaatgtggtgagtgaacccggcctgggcagcagctttaccttgcaggtcgcattgcaggtcgttcccggcagcctcaccgattgcccgacgttcagccccggcctgccgcctgtctacgtacgggcacaggaacccgaacgggcgcagcacctgatcaactggctcaatcgcctggggctgtccagccgtgcgctgtcagccgagatgccggccaacgcgctgctggtggatttcgcccaggacctggcatggcccggcccgcgcatcatcgcctccgagggcgggcctgacccggcgcaaccgtgcggtgccgactggagcgtcgatgccgacaatgcgcgcgccattgcctgggcgatccaccgggcgcagcatggcgccgaagccggcccacaccgcgtaccgtccgccaaggcgcagccactcaacctgcgggtgctggtggccgaagacaatgtgatcaacgcggccattatcaaagaacaattggaagccctgggttgccaggtggtcgtggctggcaacggcaaacaggcgctgatgcagtggctgccgggacgcttcgacctagtgctgaccgacgtgaatatgccggtgatgaacggctaccaactgaccgaagccttgcgccgacaggacaccacgctgccgattatcggggtgaccgccaatgccctgcgcgaagagggcgagcactgtgccgccgtcggcatgaacgcgtggatggtcaagccgctgagcctcgccgccttgcgggcgcagttggaacaacactgcaaggtcgaaatgccggctgtcgtcgagatgccgccgttgtcacccaggatgcgtgagctgtttgtcaccacgttgcgccatgacgtacagaccaccttgaccgcgctggacaatcaggacgccaatggcgcggcgcaacaactgcacagcatggccggcgccctgggtgcggtgcagctcggtgacctggccagcgcctttgtcgcgctggaactgcgcctgaccggcatggccgtcacgccggccctggccttggaagtacgacagcacctggcgcggctcagcgcattgctcgacactcttgaataacttcactctggataaaaaacccatggaaaccctcaacgtagtcatcgcagacgatcaccccatcgtgctggtcggggtgcgggaactggtcgaacgtgatgagcgctttcgcgtggtgggcgaagccgtgtgctccaacgaactggtgaagttgctggaaaacaccgaggtggacctggtgatcaccgatttcaacatgccggcggactcgccctacggcgatggcctgaagttggtggagtacctggttcggcacttccccaaagtgcgcgtgctggtgctgaccatgatctccaacccgctgatcctcacgcggttgcaggagctgggtgtactcgccgtgatccagaaaaaccagctgcacgtggaaatccaggctgcgctcaaggccatcgcgcgcggcaacccgattcgcagcaaggggccgcagccgacctcggtgctggagtcatttgatctcgaccagcgcttcacccggttatcgcccaaggagcacgagattctgcggctgtttgtctccgggcaaagtgtcaacgagattgcccgtgggttgaaccgcagcgccaaaaccatcagcacgcaaaaagtcgcggccatgcgcaagttggaagtcagcagtgaccaggacttgctggcttattgcatagagcgcaacttgtttaactaacacccacttctagggatcgtctgatgtccccccccaaggcctgcgccttattgtgttgttttaaccccaagcatggaaaaacaacatgaaacagctctctcgcgcactcttggctctgtcggtatttgccgcagttaatacatttgccgccggtgaacccaccgcaccaaccaaagccggtagcggcaccattagtttcaccggcagtatcaacaatgatgcctgttccgttgaagggattggcctgaacaaaaccatttcgatcaacatgggcgaagtgtcgatcaaggacatgggcaccgcgaccgcgccaaaaggcagcggtaccctgagcgccgagaacttcgacatgaagatcagctgcaacgccggcaccaaggtggcaatgatcttcgaaccgaccaaaggcgcaggttcgggcatcgtcgccggcaccaaagtgctgaagctgatcgacggcctgggcgccgccaagaacgtcggtatcgccctgctggacagcaacggtgcgttgatcgacctgagctcgccgaccaccgcgaagatcgaaaacaccctgcaagacagcaacaccacgctgaaattctcggccgcctacgtcaccacagccgacgctgcgactgccgtagccggtcgcggcgacgccaccctgccgttcaccctgcaatacgaataaccccagcgtcgcggggccttcgggcctcgcacactcttcgaacgtagcggtagccatcatgttatttcgtcattctctatccctctgcgcgggcctgctgggcctgttcgcggtcagccaggccacggccggcatttcgttgagcagcacacggctggtgttcgacggccagcataaagaagccggtatcacggtgcgtaacaacggtgaagacgtgctgatccagtcctgggtcgataccgacactgacagcacggtgccgtttgccgtgaccccaccgctggcgcgggtcacggccaatgagcaacagctgttgcgggtgatttatgccggcgcgggcctgcccaccgaccgagagtcggtggtgtggctcaacgtacaggaagtccccaaggcatcgaaaacccagaacaccttgcagcttgccgtgcgccagcgcatcaaggtgttctttcgccccgccggcttgaacaacaacgcttacctggcaccgaccgaactgctttggcagttggccgagcacaacggcaagcacgtgctgcgggttaccaacccgggggtttatcacgtgtcgattgccgacattaccctgcaagccggtgccgtcagtgaacacccgttcgattcaatgatgattgcgccgggtgaactaaaagagttcaaccttaaacaacttaattccagccagccggcacgcttgatattcggcagcattaatgactatggcgcacaagaccgttattccacgcaactggttaacggcgcgccaacttcagccagtttgaacacagaatcaccataacgcgcctgccgttcgcgcagccgcactttcactgtatttctcttcgctccgttagttcgtatcggaggtgatatagggttcctgcatgtttttattcaagcgcgatggattggcgccgttattgattgccctgggcttcacttcagtgtgccaggccgatggcgacgaacaattcaatacttcgtttttgcaaggtgcggcggctgacgtcgacttgcacacactgctcgccagcaacagcgtgctgcccggcaattaccgggttgacctgtacggcaatgaaaccctggtgggtcggcgagatatcgactttcgccgcaacccgcaaaacggcaaggtcgaggcctgcctgaccctggagatgctgcagcaagtgggcgtcgatatcggcgcattacaagccagcggcaagctcgtcgataccgacccgaatgcctgcctggacctgcccaccttgatcgagcatgccagcgtgcgctacgacgtaccgcgcctgcgcctgctggtcagcgtgccgcaacgcgccatggaacgcgggcggcgtggctacgtcgaccctgcgctgtgggacgaaggcgtgcccgcggccttcgtcaactaccaactgagcagcaaccgcaacagcaccgatgccgataccacgctctcgaacaacctgggcctgcgcaacggcatcaacctgggcgcgtggcgcctgcgcaacgagtcgaacttcaacagcagcaccgaccgccccagtacgttcaagagcaaccgcacctacctgcaacatgacgtgacggccttgaagggccagttcagtgccggggatattttctcggacaccgacctgttcgacagcgtgcgctatcgcggcctcaagctggcgtccgacgatggcatgcgtgccgacagcgagcgtggctacgcgccgatcatccgtggcattgcgcaaacgagcgccacggtggaaatccgccagaacaattacatcctctacaccgccaacgtgccaccgggcccgttcgagatcagcgacatttaccccagcggctccaacggcgacctggaagtgacggtgatcgaggctgacggccgtcgccgggtcacggtgcaggcgttttccagcctgccgatcatggtgcgcgaaggccagttgaaatacagcctctccgccggccagtacaacagcaatgacgacgggcaagaaaacccgcagtttgtcagcagcaccctggcctatggcatcagcagcaacctgtcggggatcgtcggcgtccaggccacgcaggacttccaggcgttgtccgtgggggcaggacgcaacacgtcgatcggcgcggtatcgctggatgtgacccactccgtcagccgcaccttcggccagcaggtcacgggtaacagcgtgcgcgcgttgtatgccaagacctttaccggcaccgacaccaacttcaccttggcggcctatcggtattcgaccgagggctatcggaccctcaccgaccacgtcgaggaactcagcaatgagggccagaaacgcaccggcaactccaagacccgcaccgacctgaccatcaaccagagcctgggccgcaaccagcagttcggcagtgtctatgtgaatgccagcgaccagcgctactggggacgcggcggctcgcaaagtctgtcggcgggctacagcaactactggggcgacgtgagctacaacctcagcgccacgcatacccaggacgtgggcaactacggggcatcgaacaacgacacgctgatcaacctgtccgtgtcctttccgctgggttcaaagccgcgcgcgccgagggcattcatgtcggccagcacgcaaaaaggcagtgactccacgcaactgggcgtcaacggctacctgaccgaaaacagcgacacctattactcgctgcaagccggtaacagcagcacgggcggtagcaccggttcggccaacctcagcacccgcacctcgctgatggacatcagcggcggctacagccagggccgagggtacagcgcgcagaacctcaacgtggcggggtcggtggtagcccacgcaggcggtatcaacctgggccagaccgtgggcgagacctttgcgctggcgcacgtcgacggcgtgcagggtgtgaagatcggcagcttctccggggcaaagaccggccgtaacggctatgcggtgatccccaatgcgcaaccctaccgcgtgaactggatcagcctggacacccgtgacctgggcgctgacattgaaatcgataacgccacccagcaggtcgtgcctcgccgtggggccgtggtagtggcccgctataccagcaagagcgggcggcgtgtgcagttcgcgttgttcgacgcgcatcacaagcccatcccgtttggtgcgtcactggagagtgttgcgggcaagcagatcgcgatgtccgaccctagtggcaaggcattggcattgatcgaagaggatgccggtacgctggtgatcaagtggggtgagcagcactgccaggcgccgtatacgctgggcgagcgcaacaaggcgctgaactatgagcaggtagacctgacctgcttgccacaacgctaaaaacaccagagaacccatgtgggagggggcttgcccccgattggggtgtatcagccaacttatctgtggccgacccaccgcaatcgggggcaagccccctcccacatttctgtacctgtgtggcttagaaatcgcgtttatagaagatatccaatgagctggccacaccgctcgccacttccaggtacaccttcttgctcaacaggtagcgcaaggcaatggtgctggccggttcgaacacgcctaccccataccgcaggctgagtttctcggtgatcttgccgctggccaccacggcggtggtgttgccgctgccctgggtgtcgagttcgaagtcctggatgcccaggttcttcgccaggtccgaggtgacccccgcgctgcccatcaagccgaggcccagcgcagcctgggccagcatgttgttgtcttcaccggtggtgctcagcggacgccccagcaccaggtaggacagcgcttgttcctggctcatggccggttcggagaagatttgcgtggtgggctgttccgcgctgccgctgaggcggatacccgcgaccacatcgccggtcttgcggatcgcttcaatatccaggaacggttgatccaacggcccggcgaacaacagccgcgcacgccgcacatcgagcttctggccgtaggcgcggtagcggccgtcgttgagccatagctcgcctcgggtgtcgaggttgtcgccgatgtgcacctggccctggaccttggcggtgaggccgaagccggagaagttgagcttgtcttcgcccacaaccacgttgatatccatggccattgccatcggcggtttgccctcctcggtctggctgccgatgatcaccgtgtcatccgagaccttgaccgtcgacggtggcagctcgcgcacggtgatgtcgccgcgtgggatatgcacgttgccggcgatggccaatttgtcgttcttcaggctgattttcaggtccggtgctacttccagcaccgcgtaaggttcgaccgtgaccggcaactgcgagccttgcaaactgaggtccaccaccagcgccttaccccagtcgacctgccccttgaggctgccctgcccggccttgccactgcgccaggcgccgttgagctgcacactttcgccggcaatcagcgcctgcacattcaggccttccaggctgatgggcagttccggaccggagatctcaccgcccaccaggttgacgttgccgttgacctggggcgccagcaagccgccggacagacggccgttgccgttgagcttgccggtgagtttctccaccatcggcacaaacggccgtgctacggcaaggtcgaggccgacgaggctaaagttgccggttatgggtttgttcttgggtaacgggttgatctgcgcctgcaacaacagttcgccgagcttgccgccctggaagttgagctgagtgtcgatacgcttggggttgagggtggtttcaagtttcagggtgttgtagggaaaatccagccactggtccttgtccttgacgcgcaaggtgccaccactggcgtccaccatcaccacgcccttggggccactggccggcaggtccagttgcaggtcggcattgagcttgccctgccaggcgaaatccttcggcaggaacgccgccaggctgtcgatggggaattgcttgaggtggtaacgcagcttcggctcgggcatcaggcgctggtcttcgccgcacaggctggccggcccggacacccagcagtgcgcggcaaaggtcagcctgccatcagccatgcgttcgatcctggccggggcttgcagcttccagtcctggccaccggcttggacgtcgccactggccaagcgcccgcgccagttgcctttgtcgaggttgccgtccaatgccagggccagcttgaccagcgggccgaccaggtcgagctggaccttctggttcttgatatcgccctgggcactggcggtcagggtgccgacctgggtctcgccggattggataccgctgcccttcaggtcaatcttggcgcgctgggcactgtcgagactggcgtcgagggtgaggctttgcaggcggttatcggcaaacgccagttgctggcccttgaggtcgagtttgccttggggcgccttgaggctgccagccacgtcgagtcggccattgacctgcccgcgcaactgcggccacaactgggccaggcgcgtcagtttgatgtcgatctgcccggccaggcgttgttgcaggctgccactgccgttgatgcggttgtcgcccaggcggatattcaggttggccagggtccactgctcacccgcgccttcggccttggctgccagcacggcggtttgcccgcgcaggcggcccttgaggtcgaggtcggcattcagcttgagctgctcgtgcttgaactcgcccttgctgcgcagcggcccggccagggtgccgggcaattcggcgacccagtacgccgggttcagcgcagacaggtcgagtgccgtgtcccaggcgatgccatcggcgaattgcagattcaggtggccctcggccttgccctggccggcggtgagtttcagctcgggcaggaagatttgcttgaggtcgccactgaacggcgtgaccacgttgaacttgcctgcggggccgtcgaggtcggccttgaggttgcccaggtagttgccatccttgtaggagatctcgccattgaatgtacgcagtgcaacttggggctcatcgatgacgggataaaggcgatgccaggggaagtccagccagtcgaccttggcgtcagcgctgaagccttgttgccagtccaggttggcgctgagtttcaggctttgcttgtcgtcgccatacaggtcgagtttttcgatctgcgcccctttggcatccacgcgccccagcaacaacaggcttaccgggctcttttcggcaggcagcgacgccttgcccgagagcacataaccggttttcaggtcgcccttggccaggagcaccagctcattgagttgcagggtgtcaggcaaaccggcatccggcttgaacgcatcggacttgatcagcacttgtcccggcagatcttctgccagcggttgcaactgcgccagcaggctgccgtccaggtagccatggctatcgccgttgacggtgagggtcttgagcaagtcgccttcgactttgaggccaaccgtccactgttcaccaccgggcgcgtaaggcaggctcaagttaccgctggcgttcaacggccagtcgccggtgggttgcagcagaccagccaggtccagcaccaggccatcgcgttgcagatgcaccgaatcaatttgcatgcccgcggcggtccagtgcgccgccagttgcaggcccttgagttcttcgctgccgttgaacagcaggctgccgacgcgaacatcgcccaactggatggccagcggcagtttcagatcgggtagttcgatcgggccgctgctctgctcggtactgggagggaattgcaggctgacttgctcgacatccagttgattgatgcacagggtcatgcgcaacagacacgccggcgaccaatccagcttgggcgcctggagttcgacacggctgctgtcctgctgccacagcagatggtcggcgctccactggccacccaaatgcccctggaaattctccagggtcaaccccggcacgcggcccaatgcccagcggctgcccgcctgggtgcccagcgccgtccacagtgctagcaacaacacggcaaggctggccaccacggccagccccgctattttcacaccacgcatcacagctcaggccccatggaaaagtgcaatcgaatgccgcccgggtcttccagggcatgggccaggtccagacggatcgggccgaccggcgacacccagcgaataccgacgccgacgccggttttcaggctgggcaggtccagattgttgaaggagttaccctggtcgatgaaggtcgcgatccgccatttctcggcgatggaatattgatactcggcgctcagggccaccatgtagcggccaccaatacggtcgccgcgatcgttctccggcgacagcgtctggtactcgtagccgcgcacgctctggtcgccaccggcaaagaaacgtagcgacggcggcaccgagttatagccgttggtggcgctgccgcccacctgcgcacgggccaggaagcgatggttgtcccacagcgtcgtcaggcctttgaccatggccgtgccgtaaagcaggttggtatcggagcccaggccttccttggcgactttggtgtcgaattgcaggcggtagccgttgtgcgggtcgatacggttgtcactgcgcaggtaggagtagctgatccctggcatcaccaggttactcaggccggagtcattgcccaggcgatattcttcacgctggtacttgagcgaaatcacccgggtccagccgctgggcagcttgctgtgccactcggggcccacggtgagcaatttactcagggtgtcggtgttggcgatctcttcgttctgatagccaccggcaaagcgcagtttgtcggtgagcggtgggtccagtggaatgtcgtaccacaggccgacgttctgtcgcggcgccgacagctcggcttcccaaccatagctatggccctgggggttgacccagtggcgggtccagttggctttgccgcgcgggccgacgtcggtggagaaacccaggcccaggcccatggtgcggggtttgcgggtctccaggcgcacggccaccgggatgatgtcattggttgaagccgccggggcggcgtccacgcgcacgccttcaaaaaagccactggcttgcaggttctggttgagttcggcgatcagttcggaatcatagggcgtgccgcttttgaacggcaccatgcgttgcagcagctcttcgtcaaacggcgtgtcgccggcaaagctgaccttgcccaaggcgtaacgcggaccgctgtcatagatgagttcgatatcggcgacaccggccttggggtctaccgctagtttctggcgggtgaagcgcccattgaaaaaaccgtagcgcgaggcctggttctggatcaggcgcttggcgtcttcgtaatggccgtggttgagcacagcgccggccttgaggtcgttgctgacgggcacgcgaaaggtcttgaggtctgcggcggggccgtcgacccgtatggtcacgttgcgcaaatgcaccggttcgccggggtcgatggtgaggatcaggcgcgggttcttgccgcctttcacctcactgtcgatttgtggctgatagaagccaagggcctgggcggctttgcgcgcctgctcctcggcgccacggctgaaccgcagcaaggcctcttcatcacgatcgcccaccccgccgatatagccttcgatgttggctttcaacgcgtcgtttgagggtttgatccgcacgtccagttcgctttgcgccaacgcgccgcagcttgtgaacagcagaatcaagccgctggtaaatcttcctggaaacttcataggcgcggatgctacacgagcaagggagactctttgaactcggatttatctgaataattctggattaagccgttgcagcatgtaacgactgcggattcggatggaaaaacacatgctcgaggaccgggcctaccgccacttcaccgatttcctcgtagccctggcgtttatagaactccagataacgtgaattccccgtgtccagcaccacaccggacgaatgcgggtcttcggcacaccaattgtgcacggcttccagtaactgctcgccgtaatgcttgccctggaattgcgggtggatgcccagcaacggcagcacatgcaccgactcactgggcaggcacgccagcaccgcgtgatggtagtcgaggtaacgccgtgtaccgcgcacgccggtactcagccacatgcgcagttgccaggcccagctctcggtgatgcccaggcgccgctgcggtggcgcgatcagggcgatgccgatcaggcggtcattgacgaacaaaccaatggccggcagtttctgaaagaagtgctgcttgaccaactcgcgcacggtggcgcgtacccgttgttcataaccaggacgctcggcttcgaagatgtaggcgaaggtcggctcgtgccgataggcctggtacaacagggatcgggcctcgcgggaatagccgctgttgagcaggcgaatttcagcaattgcagttgtagtgtccggcataccgtcaatctccctgggcgcggctcaaaaggcagcgttcttatgggtacgaacctacacagcacgagtcgttcccagacattagcagtgcatgtgccctaccgccacgctggcccccgtccgacttgtccgctagcatcgcccttttgccagaccggactgccgaccatgaaaatcgtctccttcaatatcaacgggctgcgcgcccgcccacatcagttggcggcgctgattgaaaagcaccagcccgacgtgatcggcttgcaggaaaccaaagtccacgatgaccaattcccgctggctgaggtacaggcccttggctatcacgtgtactaccacgggcaaaaaggccactacggcgtcgccctgctgtcgcgcaaggaagccctgagcgtgcacaaaggctttgccagtgacgaagaggacgcccagcgtcgctttatctggggcaccttcgccgacgagaacggccacccagttaccatcatgaacggctatttcccccagggcgaaagccgcgaccaccccaccaagttcccggccaagcagcgcttctacgaagacctgcagcaactgctggaaagccagttcagcaacgaccaggcgctggtggtgatgggcgacgtgaacatttccccggaagactgcgacatcggcatcggcgccgacaacgccaagcgttggctcaagaccggcaagtgcagcttcctgccggaagaacgcgaatggatggcccgcctgaaaaactggggcctggtggacagcttccgccacctcaacccggacgtggccgaccgcttcagctggttcgactaccgcagccggggctttgaagacgagcccaagcgtgggctgcgcatcgacgtaatcctcgcctccaatggcctgttggcgcgggtcaaggatgccggggtggattacgagctgcgtggtttggaaaaaccgtccgaccatgcgccgatctggctggaactgagctgatcacaccctgtgggagggggcttgcccccgatggcagtgggtcttcagcccatctatagctgacacgccgctatcgggggcaagccccctcccacatttagccttgcggcgcgtacgtcatatttatgcaacctgtctgacttattctcgcggcaccccctttggcttgagaaggtgccggcatgaggctgcgcgttctgttactgctgactgtttttcccctcttcgccgtttccgcctccctgcccgttcctgatcaaggccctgctttgcgcatccagggctccaataccattggcgcggcgttgggcccggcactggtcaaggggctgatggagcatcagggcttgcaggcggtgcacaacgaaccgggcgaaggcgccaatgaacagcgtgtgatcggcaagacgcgccaaggcaagaccgtgaccatcgaagtcgcggcccatggttcgagcaccgggttcacggcgctgaaaaaagccagcgccgatctggccgcctcgtctcgcccgatcaaggacaatgaactggtcgaccttgaacccctgggcgacctgaaaagccccgaagccgaacaagtgattgccatcgacggcctggcgatcatcctccacccgcagaacccgttgaacacgctgaataccgagcaactggcgcagattttcaatggtgaggtcagtacctgggaggcactgggtggagtgggcggcctcattcatgtgtacgcacgggatgatcaatccggcacctacgacacgttcaaggaactggtgttgcgtttgcgtggcaagccgcttgcatcgggtgccaagcgcttcgagtccagcgagcagctgtccgatgcggtcagccacgacccgcagggcatcggctttatcggcctgccctacgtgcgccaggccaaggcggtggcgattgtggacggcgactcacagcccatgttgccgctcaacagcctgattgctaccgaggattacccgctgtcacgccggttgtttttctacctgccgccgtccgggcgtaacccgtgggccaaggcactggtggactttacccagggcaccaagggccaggcgattgtggccgccaacgggtttattgcgcagcaggtgcaggcgatcgccgtgcaaccgcgcccgtcgatgcccgaggactaccaggccatcgcccgcgaggcccagcgcctgacggtgaattttcgctttgaagaaggcagcgccagcctcgacaacaaggcgcgccaggatctgcagcgggtggtggcctatctgaaacaccacgacaagttaaataagcaggtgacgctggtgggctttggcgatgccaaggatgacccgcagcgcgccgcgttgctgtcgaagctgcgggcgatggcggtgcgccgggagttggtcaagaacgccgtggtgctgcgcgatatccgtgggtttggcgcgcagatgccggtggcggcgaatacggcggatgaggggcggatcaagaatcggcgggtggaggtttgggtttactgaagactgatggagcttcattgcctgatccgactgcatcgggggcaagccccctcccacattttgatctgtgaacacatccaagtgtgggagggggcttgcccccgatgcaggcgacccgctgttactgcccgctgcgcatcagctctttaggcacatacttgccaatctcgaacttgccgatggccgcccggtgcacttcatccgggccgtcagccaggcgcagggtgcgttgcatggcgtacatgtaggccagcgggaagtcgttggacacgccggcaccgccatggatctggatcgcgcggtcgatcaccttcaacgctacgttcggcgccaccaccttgatctgggcgatttcgcttttcgccactttgttgcccacggtgtccatcatgtacgccgccttcagggtcagcaggcgcgccatgtcgatctccatgcgtgagtcggcgatcttgtcgatgttgccgcccaaccgggccagcggtttgccgaacgcggtacggctgaccgagcgtttgcacatcaattccagcgcgcgctcggccatgccaatggagcgcatgcagtggtggatacggcctgggccaaggcggccctgggcgatttcaaaaccgcggccctcgccaagcaggacgttctcatagggtacgcggacgttgtcgaacagcacctcggcgtggccgtggggcgcgtcgtcgtagccgaacaccggcagtgggcgcacgatcttcacgccgggagcgtccaccggcaccaggatcatcgagtgctgctggtggcgtggcgcatccgggttgctcaggcccatgaagatcaggatcttgcagcgcgggtcgcaggcgccggaggtccaccatttcttgccgttgatcacccactcatcgccctggcgttcggcacgggcggccatgttggtagcgtcggaagaagccacgtccggctcggtcatggcgaacgccgagcggatctcgccgcgcagcagcggctccagccagcgtcgcttctgctcttcattggcgtagcgcaccagcacttccatgttgcccgtgtcgggggcggagcagttgaacggctccgggcccagcagggaacggcccatgatttcagccagtggcgcgtattcgaggttggtgaggccggcgcccagttcggattcgggcaggaacaggttccacaggccttcggctttcgccttggctttcagctcctccatgattgcggtgggctgccagcggtcgccttcgctgacctggcgttcgaacaccggctcggccgggtaaacgtaagcatccatgaacgcagtgacacgttcacgcagttcctgaaccttgggcgaataggcgaaatccatgagcagctcccttctctgagaggttgtttaggtcatgcaatcgatgctagaacagcgttgataatttacctagcctattctcggcgtgtattaacattcatcaccgatatatgatcgacgtatggccacctaacaataagagcgctgcgaaatgaatctgagcaaggtcgacctcaacctgtttatcgtctttgatgcgatctacaccgaagccaacctgacccgcgccgggcagattgtcggcatcacccagccggcggtgtccaacgcgctggcccgcctgcgtgagaccttcaacgacccgctgttcgtgcgcaccgcccagggcatggtgccgacgcccatggcgcagaacatcatcggcccggtgcgcaatgcgctgtcgttgctgcgggtgtcggtgcaggaaagccgcatcttcaacccgcagcaggcggccaagacttaccgcatcagcatgaccgacctcaccgaggcggtgatcctgccgctgctgttccagcgcctgcgccgcctggcacccacggtggtgatcgagagtttcctgtccaagcgccgcgaaaccaccaaggaactggccgccgggcgcctggattttgccgtggatgcgccgctcaacaccgacccgcaggtacgccacgtcaagctgatggaagaccgctacgtgtgtgccatgcgcaagggccatcccatggccggcaaagacaagctcacgctggatgactacctgtcgctgacccatatccatatctccagccgccgcaacggcctgggtcatgtggacctggcgctgggcaagatgggcatccagcgcaagatcgccctgcgctcccagcattacctgatggcctcgcaggtgctgcagcagaccgacatggtcatgaccgtgcccgagcgcttcgcccgccgccatgaactgcactggttcaacctgccggtcaacgacgtgccgccggtggaaacccacctgtactggcacgaaagcaccgaccaggacccggccaaccgttggatgcgcgagcagatgatcgagttgtgccagcaggtcaccgcccacgagaagaaactcgataaacaacaggcgtgaggttgaagcgccggccctgtgggagggggcttgcccccgatgggtcgcgcagcgacccttgacgtttacgtcaacctgccagtagcttaacgccaagacctccttgagcgcccccatgagcaccacctacagcatctccgacctcgcccgcgagctcgacatcaccacccgcgccattcgcttctacgaagaacaaggcctgctggccccggaacgccggggccaggagcgcatctactcggcccgcgacaaggtcagcctcaagctgatcctgcggggcaagcgcatcggtttttccctggccgaatgccgcgagctgatcgaactctacgaccccaccagcggcaaccacgtgcagctcaacagcatgctggcaaaaatcgccgagcgccgtgagcagctggaacagcaactgctggacatcgaacagatgaagctggaactcgacaccgccgaagagcgctgcactcaggccctggcccacaccctgcgccaggccgaccactgatcagaaggtaaccgccatgtccctcccctcacacgtacgcctggtggaagtcggcccgcgcgacggtttgcagaacgaagcccaacccatcagcgtggcggacaaggtccgcttggtggatgcattgagcgcagccggcttgcgctatatcgaggtcggcagtttcgtttcacccaagtgggtgccgcagatggccggttccgccgaggtgtttgcgcagatccagcgcaagcccggcgtgacctatggtgccctggcgccgaacctgcgcgggttcgaggacgcactggcggcgggcgtaaaggaagtggcggtgtttgccgccgcgtccgaggcgttttcccagcgcaatatcaattgctccatcagtgaaagcctggagcgctttgcgccgatcatggcggcggccaggcaatacggggtcagcgtgcgcggctatgtgtcgtgcgtgctggggtgcccatacgaaggcgagatcgcgccggaacaggtcgcggccgttgcgcgggaactctatgccatgggctgctatgaagtgtcccttggcgacaccatcggcaccggtacggcaggcgccacgcggcggctgttcgaggtggtcgcagcccaggtgccacgggacaagctcgccgggcacttccatgacacctatggccaggccatcgcgaatatctacgccagcctgctggagggcatcacggtgttcgacagctctatcgcgggcctcggcggctgcccgtatgccaagggcgccagcggtaacgtcgccaccgaagacgtgctgtacctgctcaacggcctgggtatcgagaccggtatcgaccttgaggcattgattggcgcggggcagcagatcagcagcgtactgggccggccaacaggatcgcgtgtggccaaggcgcgtaacgccggttgagtagcttagccgtgacaatgtgttaccgcacgcctacacgtcgagtaacacgggaacatattttgtcgtatttgccgtaggccaaaccccacacaaaaatcaactcattgattttaaaggaatttaaaaagttggcacggcttctgctatctctatggcataacaagaataaaaagcgccaaacctaataaaaataagacgaaacgactctgatataacaaaaacaatacggcagagacgcagctaacagatttttttggagaagatgtgcttcgcagggtacggcatgacgaaacccgcaaccggtcagagaaaaataaaactacctcaggtagctgcccactggttggatcgattgcgaagaagcagatcagcgctcaaaaaaatacgtttgctcttgaccccggatgggggtcgccaaaaacagcggtaaagggtaacggttgccaaaaacaacaatagaccgcccctcaataataaaaaaagagcacgcaacgacaaattaaaggggaccctcgggtcccctttgtgctttcagggatttattcctgccctgcccccaactcttgcatggaaatctcgcgcatgcggaatttctggatcttgcccgtcaccgtcattggaaactcctctacgaacttgaagtgcttgggcgtcttgaagtgcgcgatgcggcccttgcaccaggtttgcagctccagctcattggcgacatggccggggtggaacttgatccaggcgacgatggcttcaccgtagcgcgcgtccggaatgccgatgacctgcacatcggctacagccgggtgggtaaagaaaaactcttccaactcgcgcgggtatacgttctcgccgccacggatgatcatgtccttgttgcgcccggcgatgcatacgtaaccctgggcatccatgctcgccaggtcgccggtgtgcatccagccggcgtcgtcgatggcctcgcgggtggcgtctgggttgttccagtagccgagcatcacgctgtagccacgggtgcacaattcgccgatttcaccgcgcgcgagggtgttgccgtcggcgtcgatgatcttgttttccagctgtggctgggtgcgcccgaccgtggtcacacggcgttccaggtcgtcgtccgctccggtttgcagcgacaccgggctggtctcggtcatgccgtaggcaatctgtacctcgcgcatgtgcagctcgctgatgacccggcgcatcacttcgatggggcacgtggcgccagccatgatgccggtgcgcaaggtggacaggtcaaagtcgcccagctgtgggtgatcgagcagggcgatgaacatggtgggtacgccataaaggccggtggcgcgttcttcggcgacggtggtgagggtcagcagcgggtcgaagccgtcgttcggatagatcatggtggtgccatgggtgatgcagcccaggttgcccatgaccatgccgaagcagtgatacagcggcaccgggatcaccaggcggtcttgcgcggtcaggcccaggctttcgccgaccatgtagccattgttgaggatgttgtggtgactgagggtagcgcctttgggaaagccagtggtgccggaggtgtactggatattcaccggctggtcgaaatgcaggctggcttgccggctgtgcaactgttcgggcgggacgccagccccgagcacggccaattgcgaccagggcatgaaccccgcgggcgggttgggatccaggctgatgaggccacgcacgtccggtttcagctcgtgcagcatggcgtggtaatcggagctcttgaatgagccagcacacaccagcaactggcaaccggactgcttgagcacgtagtccaactcactgctgcgataggctgggttgatattgaccaggatcaccccgagcttggcgctggcaatctggctgatgcaccactcggcgcaattgggcgcccagatgcccaggcggtcgcccgtctgcatgcccagggccatgaacgcccgcgcgtgcaaatccaccgtctcggccaactgccgccaggtgtagcggcgttgttgatggcgcaccaccagggcctcgccatcgggatactgcgcaactgtgtgatcgaaagcctggccaatcgtcatggccagcaaggtcttgtcctgtgagccacggctgtagctctgattcggttgatccataacgacccctgttgtcttttttgtaggttgacgtaaacgtaaactacgattgacagcgccgtaacgcaagcttacgttaacgtaaaggtgagcgccctcccctggcgccccatctacacaacaacaatgctcacattaaggtgcctgtccatgagttacccgtccctgaacttcgccctcggtgaaaccatcgacatgctgcgcgaccaggtgcagtcctttgtgggcaaggaaatcgcgccccgtgcggcgcagatcgacatcgacaacctgttccccgccgacctgtggcgcaagttcggcgacatgggcctgctaggcatcaccgtgcccgaagaatatggcggcgccggcctgggctacctggcccacgtggtggccatggaagagatcagccgcggctcggcctcggtggcgctgtcctacggcgcgcactccaacctgtgtgtaaaccagatcaaccgcaacggcagtcacacacagaaactcaagtacctgcccaagctcatcagcggcgaacacatcggcgccctggccatgagcgaaccgaacgccggttccgatgtggtctcgatgaagctacgcgccgataaacacggcgaccgttacgtactcaacggcagcaagacctggatcaccaacggccccgacgccagcacctatgtgatctacgccaagaccgacctggaaaagggcccgcacggcatcaccgcgtttatcgtggagcgcgactggaaaggcttcagccgcagcaacaagtttgacaagctgggcatgcgcggctccaacacctgcgagctgtttttcgatgacgttgaagtgccggaagaaaacatcctcggcgtgctcaacggcggcgtcaaagtgctgatgagcggcctcgactacgaacgcgtggtgctctccggcggccctaccgggatcatgcaggcgtgcatggacctgatcgtgccctacatccacgaccgcaagcagttcggccagagcatcggcgaattccagctgatccagggcaaggttgccgacatgtacacccagctcaatgccagccgcgcctacctctacgcggtggcccaggcttgcgagcgtggcgagactacgcgcaaggatgccgccggggtgatcctctacagtgccgaacgcgccacgcaaatggccctcgatgccatccagattctcggtggcaatggctacatcaacgaattccccgccgggcgcctgctgcgcgacgccaagctgtatgagatcggcgccggcaccagtgagatccggcggatgctgatcggtcgcgaactcttcaacgaaacccgctgaaggagcgctccatggccaccttgcacacccagctcaacccgcgttcggcggagtttgccgccaacagcgcggcgatgcgccagcaggtcgacgccctgcacaccctgctcgcccacgtgcagcaaggcggcggcgccaaggcacaggagcggcacacctcacgcggcaagttactgccgcgcgaacgtatcaatcgtttgctcgacccgggctcgccgttccttgaactcagccaactggccgctcatcaggtgtacggcgaagacgtgccggccgccggggtgatcgccgggatcggccgcgtggaaggcgtcgaatgcatgatcgtcgccaacgacgccacggtgaaaggcggctcctactacccgctcaccgtcaaaaaacacctgcgcgcccagaccatcgccgagcagaaccgcctgccgtgcatctacctggtggactccggcggcgccaacctgccgcgccaggatgaagtgtttcccgaccgtgagcacttcgggcggatcttcttcaaccaggccaacatgagcgcccaaggcatcccgcagatcgcggtggtgatgggctcgtgcaccgccggtggcgcctatgtgccagccatggccgacgaagcaatcatggtgcgcaaccaggccactatcttccttgccggcccaccgctggtgaaggccgccaccggtgaagtagtgactgccgaagacctcggcggtgccgatgtgcactgcaagatctccggcgtggccgaccactatgccgacagcgatgagcatgcactggcgctggcccggcgcagcgtggctaacctcaactggcgcaaacaaggccagttgctgcaacgctcgccagtcgcgccgctatacagcggtgaagagttgtacggcgtgatcccggccgacgccaagcagccgtttgatgtacgcgaagtcattgcacggctggtggacggttcggtgttcgatgaattcaaggcgctgtttggcaccaccctggtgtgcggctttgcccacctgcacggctacccgattgcgatcctggccaacaacggaattctgtttgccgaagccgcgcaaaaaggcgcgcattttatcgagctggcctgccagcgcggtattccgctgctgttcctgcagaacatcaccggcttcatggtcggccagaagtacgaagccggcggcatcgccaagcacggcgccaagctggtcaccgccgtggcctgtgccaaggtgccgaaattcacggtgatcatcggcggcagctttggtgccggcaactacggcatgtgtggccgcgcctatgacccgcgctttttgtggatgtggccgaacgcgcgtattggcgtgatgggcgccgaacaggcggcgggtgtgctggtgcaggtcaagcgcgagcaggctgaacgcgccggcacagcgttcagcgccgaagaagaggcggcgatcaagcagccgatcctcgaccagtacgaaacccagggccacccctactactcgagcgcgcgcctgtgggacgacggtgtgatcgacccgttgcagacccgtgacgtgctggccctggccttgtccgctgcgctgaatgcccccatcgagccgagccgcttcggcgtgttccgcatgtaaatggagctgtaccccatgagcgatttcaacaccctcgaactgatcaccgacccccgtggctttgccacgctgtggctcagtcgtgaagccaagaacaacgcgttcaacgccgagatgatccgcgaactgatcatcgccctcgaccgggtacaaggcgatccgtccctgcgcttcctggtcctgcgcgggcgcggcaagcacttcagcgccggcgccgacctggcttggatgcagcagtcggccgagctggactaccacaccaacctggacgatgcccgcgaactcgcggagctgatgtacaacctggccaaactgaaaatcccgaccctggcggtggtgcaaggcgcggcctacggcggtgcactgggcttgatcagttgctgcgacatggcgattggcgccgatgatgcgcagttctgcctgtcggaagtgcgcatcggcctggcgccagcggtgatcagcccgttcgtggtacaggccatcggcgaacgtgcggcgcggcgctatgccctgaccgccgaacgctttggcggccagcgagcgcgcgacattggcttgctggcggaaagctatccgatcggcgagctggaccatcaggtcgaacagtggatcgccaacctgctgcacaacagcccggcagccatgcgcgccagcaaagacctgttgcgcgaagtgggcaacggtgccctcaccccggcgctgcgtcgctactgcgaaaacgccattgcgcgcatccgggtcagcgccgagggccaggaaggcttgcgcgcgttcctgcaaaaacgtccaccgagctggcagccccaggagccgcgttcatgagtacattgacgaccctgctggtggccaaccgtggcgagatcgcctgccgcgtgatgcgcaccgccaaggccatgggcctgaccaccgtggcggtgcacagcgccatcgaccgcgatgcacgccacagccgtgaggcagatattcgcgtcgacctcggtggcagcaaagccaccgacagttacctgcaaatcgacaagctgatcgctgccgcccaggccagcggcgcccaggcgatccatccggggtatggttttttgtcggagaacgccgggtttgcccgtgcgattgaagccgccgggttgatcttcctcgggccgcccgcctccgccatcgatgccatgggcagcaaatcggccgccaagacgctgatggaaaccgcaggcgtgcccctggtgccgggctatcacggcgacgcccaggacctggacaccttccgcgccgcctgcgaacgcatcggctaccccgtgctgctcaaggccaccgccggtggcggcggcaagggcatgaaggtggtcgaggacgtcagccagttggccgagtcgctcgcttcggcccagcgagaagcgctgtcgtctttcggcaatgggcagatgctggtggagaaatacttgctcaaaccacgtcatgtggagatccaggtgtttgccgatcagcatggacactgcctgtacctcaacgaacgagattgttcgatccagcgtcgccaccagaaggtcgtcgaggaagcaccggcgccggggttgagtgttgaacaacgcaaggccatgggcgaggcggccgtgcgtgcggcccaggccatcggttatgtcggcgcgggcaccgtggagttcttgctggacgcacgcggtgagttcttcttcatggagatgaacacgcgactgcaggtggagcaccccgtcaccgaagcgattaccggcctagatctggtggcctggcagattcgtgtcgtccagggcgaggcgctgccgatcacccaggaacaggtgccgctggtcggccatgcgatcgaagtgcggctgtacgctgaggacccggccaatgacttcctgcccgccaccgggcacctggcgctgtaccgtgaatccgcacctgggccagggcgccgtgtggacagcggtgtcgagcaaggcgacgacgtctcgccgttctatgaccccatgctcggaaagctgattgcctggggcgaggaccgtgaacaggcgcggctgcggctgctgggcatgctggatgagtttgccattggcgggctcaagaccaacctgggctttctgcgacgcattatcgggcatccggcgtttgcggcagccgagttggataccgggtttattccgcgttatcaggatgagttgctgccggtcccaggagagctaagtgataagttttggcaggcggctggcgcggcctttattcagagcctgccgccgggtgagggaccgtgggcggataggcacggttttcgcgccgggctgcctgccgaggtgtcgctgcatttgagctgcgatggccaggaccgactggtgacgctggccccccaggcgccacagtggcgtggcgaacagttgctgatcgaacaacagggcgtgcgtcgcagccatctggcggtacgccatgaccacacggtgtatctgcgttgggacggcgagatgcatggggtaacactgttcgatccgattgccgcagtcgaggccaaccagtcccatcagggtgggctgacagcgccgatgaacggcagcatcgtacgggtgctggtggaggtgggccaaccggtggaagccggcgcgcaactggtggtgctggaagccatgaaaatggaacacagcatccgtgcgccccaggccggggtggtcaaggcactgttctgccaggaaggcgaaatggttgccgaaggttgcgcattggtggagctcgaaacggcgggttaaaactttgccgtggcctgtacgacgacgcccagcagccggcaatcgtcggtcagcaactgtttcgggtaggtgggattgagcggcaccaggtaacgctggccgctctcttccagcaactggcgaaaggtcgcctgggggctcccaacccactgggccaccaccaatttaccgggctcggcggcaatggccgggtccaccaggatcatcatgcccgcactgatactcaggccactgggtgcggtcatggcgtcgccggtgaccggcagccagaaggcttcgccccgggcgtggtaatccgtcagctcgaagcgggcggcgccgtaaggtgttcgcggctcacgcaattcgcacagccctttccagtcgctgaccggatagcggaaatacgggttgtagtttttctccgcaggcggctcatcgacccgctcgcgaatatccagcgcgacttccaggtagcccagccccagcgccgccagcacccgattcatgtccaccaggctcggcgcacggcgcttgttgagccaatggccgacaccgccctgggacatgcccaggcgctcagccagttcaccctgcgtgaccttgcggtcttccatgttggccctgaccaacgcgatccagttatccatgggcgcagacaatacgtcacgcagtttccagggcaataaacagtttgtagtaatccataaaacgacataaatacgatacgtactatcatcggcataaggttttcgacacccaccccagagtaccgccccttatgacgacaagcccgtatctgctgcctgaaatccccgaagacaccgagctgcacgacctgcgcagcagcggtgctgccaagcgcgcattggacttttacttgaaagaagatatgtcggcatcagccccggacgaggccctgtttgccatcaagccaggcatcagcccggaggaagccctggtgcacgcctcggacctgttgcgcagcgccgcggccacggcctatgagtcagcgagcagccatcagggcagtcatcgcgacttggcgttttcggtggtgtatttgatcgatatggcgaaggcgatggtggagcgatcgttgcaggtgccggaggctcaagcgaacggatgacaggcgcgaagaaaaaatatttctatctcacggataaaaacatttgacttgcaaatgataatgattattattgaacccagctgatcgcgagatcagtcgatagaccaagggaccttaggtcggactcttggaatatctcctcatcaggctaatcacggtttttgacccggctctttggccgggtcttttttttgccagtttccctggcatggcttcaggctaatgaagactgtgtgttgcttgatggcgcgcatggtagcaaaagactatcgccaaaagaaagccagtcgaccgctccagcccacatctttgcgaaatagcgcttgagaatcaatctcatagaccctaagctgctgcggcgtcaaggaagacgcccccctcccccttcgcaacaattttgcgtccagtctttaccagactcctgtgtaagatagccgccacaacactcatattcaggcaaccagactatgaccgtggccttgacctccatcaggatcagcaccgacttcgacagtggcaatatccaggtactggatgcccacgacgcctatcagttactgctggcaatcaaacccgacacacgcagccaacattaccaatggttccacttcaaggccgaaggcatgcacgtgggccatacccacacctttcgcctgagcaacgcgggtaaatcgtcctacccacacgcgtggagtggctacaacgccgtggcctcctatgaccacatcaattggttccgggtgccttcgcgcttcgatggggaaatcctgcatatcagtttggaaacccgcgagaagcacgcctggttcgcctatttcgaaccctacagccgcgaacgccacgactggctgatcgaacaggccttgagccgcgccgacacccaattgctggccaccggtaaaagtgccgaaggccgtgacatccaactgctgcgtcgcggcaaaggcggcgaaggtcgtcgcaagatctggatcatcgcccaacagcatcccggcgagcacatggccgaatggttcatggaaggcatcatcgaacgcctgcaacaggacggtgacgccgagctgaaaaaactgctgaaagtcgccgacctgtacctggtgcccaatatgaacccggacggcgccttccacggtcacctgcgcaccaatgccatgggccaggacctcaaccgcgcctggcagagcgccagccaggagatcagcccggaagtgttgttcgtccagcaacaaatggaaaagtacggcgtcgacctgtttctcgatatccacggcgacgaggaaatcccctacgttttcaccgccggctgcgaaggcaacccaggctacaccccgcgcatcgaggcattggaaaaacacttccgcagccacttgagcgccctgacccgcgacttccagaccacccacggctacacccgcgacctgccgggcgaagccaacatgaccctggcgtgcaacgcggtcggccagaaatacgactgcctgtcgctgaccctggaaatgcccttcaaggacaacgacgacgcgcccaacccgaagaccggctggtcaggcgagcgctccaagcagttgggcaaggacgtgttgagcacggtagccgatatcgtcaccgtgctgcgctgacgccctctcccaccggcatcactcttgggtgccggtcatgctctgcaacacaccgtcgcggcggatcagcccatggaacaatgccgccgccaggtgcaacagcaccgtcaggaacagcaggtaggcgagataaccatgggccttgcgcagcaccgcgaacaacggcgcatccgcgcccaccagcgccggcagttgtaccgaactgctgagcatcaccgggtcgcccgccgccgaaatcatcgcccagcccagcagcggcaataccagcatcaaggcatacagcaacacatgggatgccttggccgccaacacttgccacagcggcaagtcggtgggcaatgggggctgacgggtggcgaaacgcaccatcaggcgcacgatcaccagcgccagaattgcaatgcccagcggcttgtgcaggtggatcaaccactcatgccgctccgagacagacgccgccaggcccgcaccgataaacagcatggcgatgatcatcagcgccatcagccagtgcagcaaacgcgccagcggggcaaaaaaccgtggttgggcattcatggcttcgactcctgaggggcgctgtgcaacgggccgacttcaccggcgcggcgcaggtaggaactggcatacgccgccgagcgtgccgccagcaacgggtcattggacgcttggatgccactgggcagaatcagcgggtcgaagttgatgtcgcggcaatcaccgtccgcttgcggctggctgctttgcagcaccagggtgccggcattgatgactttatgctcgccagtccaggccttgctcgcctcgtccagtgggtcacccgggttggccagggtcatattcaactgccagcgcaacggcccggtagccaggcgctggaccaggtctttttccaggtaatcactccccgccggggcgacgtcgcccgccgcgtcctgactctgcggtaccacaccccagcgcacggcctggcgcttgccatcggcccctaccaggtaaaacgcgttgataccgttgtaggtttcagtcgcataactggccgaaggcttggcagtcttgacccacgccaggaacggcgcggtctcggggtgggcggcgaaaaacgccggcatgctcgccgggttcggcttgccggtggcgggctccggtgcaccggccttgagcatctggtagaacgcctcgggcgtgcccaccgggaacaccggcatgctgttcatgccggtgcgccattgctggccgttggcctgtgtgaactgcagggcaaaactgcggatcggcacactgctgtcgggcgcgtaagggttaccgctgggcaaggcaaaccggccgatcactggggtcttggcctcgctgaacacttgggcactggaataggtgcgggcttcgggcgtgctctcgaaatacccggcgacgcagatgcctttggcatggttacgccgaaagcccgggtgcacgccattgttggtttccagcgcgttgaccagggttttaggacgcaggcgctgtgggtcgagggtgccgttgacgtaggcaaaggcccccgccacaaccgcaaccacggcaccgatacccgccaggcgcgcgatcaggctcgcgatgctcaacggaggacggggcggtgatgagtgatctaccatgaaggaactccaggccaaaggccttaggggtgaacataaggtcggagcattaagacgaacgccgatcggctctattccctggccctggatttattttcaagcacggggaataaccctcaacggcgcacgtctctctcatcccagcgtagtgaccagccagattcccatgcatgaactcgacgaacagttacgcgaactcatccccaggctgcggcgctttgccgtgtccctgacccgtaacgccagcagcgccgacgacctggtgcagtcgaccctggagcgggcgatcatcagttgggccgataaacgtgtcgaaggcgacttgcgcgcctggttgttctcgatcctctaccggcaattcctcgatgctcaccgccgcacccggcgttatgcgcgcatgctggaattctttaccgggcgtgacgatgtgcagccgtcggtcgaacgcacggtgatcgcccagtcgaccctgcaagccttcgatcagctcaacaccgagcagcgcgccctgctgctgtgggtttcggtcgaaggcttgagctacaaggaagtcgccgagatcctcgatgtgcccctcggcacagtgatgtcacgcctgtcccgggcgcgccaagccctgcgtcaactcagtgatggcgaaattgccagcccttccctgcggatactcaaatgatcagcctgccccccagcgaacgcgatttgcatgcctacgtcgatcaccaactgctggagagtgatcgccgtgtccttgaaacctatctggcggcccacccggatgtcgcagcccaggtccatgcctggcagcacgacgcgcagttgctgcgtgccgcgttgggcggtgccctgcagcaaccggccaacccggacctggacccggcgctgatccgccagcgcatcaagcgtcaatcacgccgccacttcgccacggcagccgtgctgctgatcgctgtcagcctcggcggtgtcggcggctggcacgcccgtgaagtcagccagccggcccaactgcccatggccgatgcgatgcaggcgttccgcttgtttgcccaggacggcatcatgccggccgactacaagggccagggcggcggtacgatgcaggcctggctcgaccgctatttcaaccaggcccaccgcctgcctgacctgagcgcgtcgggcttcacgccggtcagcgggcgcctgctcaccaccgagcaaggcgccgccgccatggtgctgtacgaagacccgcaagggcggcgcatcagcttctacatccgcccgccaggcccggaaaacggcttcctgccgcgtggcagccgcagtgccgatggcttgcaggcccagtactggtccggtgccggctacaactatgcggtggtcagcccggcggatcagcccaccccggcgatgttgaagttctagaaacccacgtcgagtaccacgttgtcgaggtaggtgccggcgggcggtgtggtttgatcggtgtagatcctggcgttgtagttgaacacctggctgccgctacccaggccattgccggggttgacctcggcgctggaactgtcgcgccgcgccgtgcccacgctgccccagcgcgtggtgccggcgcttttgaagatgtcgtaggccaggtagttgctgcctgagatcatgcgccgccgcccgcccacactgacagcgttctggccgtcgctcaggcccacgctgtaggcactgcccttggtgcaggaaatactgatggtctggccagtgacagcggtgaacccgctgataacgggcgcactgccaaaactgatattgggcgcggtgatctggcagtcattggtgacggtcatgctcacggtcaggagcttgacttggggagtcaggttcttgtcacgcaatacgcacaagttacccacccccaggccaatgcaataatcccaggtccatgcaacgctgaggacttcggtatacaccccggccgccacattcgtcccggtaatactgcccacgtaaagcggcaggttcttgctgcccggccccgtcaaaagccccgcgcttgtcgcaatgccattggggccgaaatcgaactggagcccgcgtgtaatagggaacgtggtggtgttattgccatacagcgtataaccgatcacatcccccgtggggccgaccatgccgctggtggtcgaggtgatcgtggcatagaagtggtcactggtgccgagggcaatcagtgaagcggtgcagctcaacccgccgttgagggtcgaactgttttgcgtcgtggtgcgtacgttgatcgaactcaccgagccaaaactcaccggggccgtcgccaccgtcgaacacagcgccattgcctgccccgagcacaccatcccgaggagcgacagccagcccacgcgtctcactggcacaccaacggcccgatcagcggcacgccttgttgctgctcgtcgacctcgaatcgcgcctggcacgtacgcccttcacccagcgtgacctgcaaggtgttatgcgccgagaggttctccaggtacaccaggccgtcccagccaaccaccgcctgctggttgctttgctcgtgcaccaccaggctgcccaagggcaattcctgatgctgggtgtccaccagggtaacgctcgccgcgagtacccggcgcaatggaaactccagcaggtagccactgccacggcgcaccgacacacgttgttccacattcgggctctgcacattgagcggcaggttcagcggatcgatttcgtacttggcgcggtagtacgcgctgctccacggcaccaggagatgcccattacggtcggtttcgcccaccagctggttctcgtagcgcaccgggatacccgcgaaaccctgggtactcaccaccacaaaggcatcattgatacggttggcggcaaaggtgtcgccacccatccacaccagcgaaccgctggcatccgcccagcgtgtctcggcatcgctgctgccgtacacgccggcctggagctgcaccgactgcaagcgccaggtcaggtcggcctgccgatacgccgcgccatcaccctgggcataaccgaggttgtagcccaccccgccctcgctgggcaccgcgctgctgtaattgaggcgctggcgactggcgccgtccttgctgcgctcggtgctcaaggccaggctgccgttgaggtcgaacggaatcaccagttgcgcctgcatcgcccagttgctgtcgccgatctcgcggttggccgacaggtagaaactggtgttgcgccacagcggtttgctccagctcaggttgagcagccgcgtgcgcgaatcgtccgccgcctgcacatcgaaataccccatgcccaggctgccaaaacgctcaaggttgaggctcagcgtcacctgctcgctgcgtttgctgaggctcgcgtaagcggtgtcgaccagggtcaggtcggcgtactcgtcgtgcctttccacccgctgataggacaggctgtagcgcgtgctgttgtactgataccccaggctcagttgctggccgctgcgcccttcaaatcggctttggctgacggcggcattgagcacgccgaggttgcccagccgcaggttgccacccaggccgcccagggtcaggtcagtggaggcttcggcatggctctccagggtcaaattgtcggaataaccatagcgaaaggtaccgctcgccacgccggggccgtaggcgaagtccttcagggtgtactcccggcgcaaggtgccggcggccaccgaaaaatccgtcaggcctttttccaacagggtgctggtcacatagaacggcaccgtggtcgacacctggcgacccagggcgtcagtcgtcaccaccaccgcttcgcccgctccgttgataaacggcacgttggtcagggtgtacggccccggttgcaacagcgcgctgtcggatttgtagccattgataaacaggtccaccgacgacggcaccgcggcctcaccggcaaattgcggcagggggtaagtcaccaggtccggacgcaccgcgaagtcccgcgagaactgcacaccgccaaggcgcaccgaactgctccagggcaaggcgccgctgatcacatcaccggcttcgtaggtcagcagccgctcatcatcggagaagcgccaggtagtgtcatagcgccggtagccgttgttgaacgtaccgctgctgacgccatcggccaaggtctggcggtactggccggtgttggacaaggtgccccagttgtcgaacaaccgcacttcgttccaagcggcgaggtagctgccgccttcgtctgtgtcgttgaaatacaggtcatagttgagcaaggcgccaaagctgctcattgcctggctgcgcgggtaggtgttgcggttgccgataaattgttcctgcagccacgacggcggcacatccagcagcaggcgctggccgttgctgtcgtaatcgctgtgcaggccggggatcttgtccagcgccacgctgccgctcaattcaccgggcagcttcatgcccacgtcctgcagcgcgctggccggcacatagagttgcccggcccgttgatcgaccgcgataacgcggccggtgtccatctgattgaccaccagctccagatacaactgtgcatcggcgacagcctccatactgctcgggggcggtggcaggtcgccagccacgctcggaagcgcaaccattgcgccgcccagcccgcccaccaccgacagccatagactgcgagccagaccacgactcaccatggcgttgtgtccttcaatggacatctccatccgtttaaatcccggggcgctcctgccccgttaccggcttgttaccgctgcggcgcgaggctctccaactgcggtgcgccgttgatcctgacctgcagcggctggtcggccgacagcgctggcggcaccggccaacgcatgctggcgcccggcagcacgtagcccaacaggccatccaccaagggccggctctgcccaccctgcttgaatgacgcatcggtaaggcgcgcatgcacagcgccctggttgcgcacttcgatatagtcacgccctgctaccgtgaccttgtgccagctcagatccggcttgcccgcgcccttggggtcacgcgggcgcgtgctgtcctccttgttccacaggcccgcaccgtaggcgaacagcggcaccgaataacgcatctgaaagcggatcgccgctgcggtgttcttgccttccggcggcgtgggcacctgcagggctgaagggatttcatcgatgatgatgcggtaggccaactcttgccccggtggtacttcacgggtgcgggtcaagcgcaccaattgtttctgccctggctcgatccgcgcgacgggcgggctgccgatcacatcacgctggttctggtattgctcttcgaaaccactctggctccaggcaaacacgcgaatctgcaggctcgcggtttcggtcccacgattttccagccacagcgcgctcgcctgttgatcggcctccagcaccgggtcgatgggccagatcagcaccgagctggccgcctgcacaagccccgccgtgcacaccgcactcaaggcaatacccgcggcccacaaccgccgggatggtgaacgcataaccccactccttataccgatagccttaccacgtcagctgcacctgcagcgtgtcgctgtatgtccccccaggctgattgcccggcaattgcacccgcccgtagatcggcaggctgatgttgttcgcatcgctgtaggccacgttgacgctctggccgatccccaggctctgactgaacgccgcatccctgaacaactggtaagccacccgcgcgctaccgctattgagctgcagattgcgcccggtgctgctgtgctgcccgccgtcgacgctcatgctcagcgtcacccccggcgtgcactgcaaggtcacgccccccgtcagcgccgccgtgaccgtgctggtggccagggccgaataactgccataggtcagcgcaccataattggaactgccgcccacgatcaggcagcccgggatgatggtcgcgctcacctggaaactctggctggtcaccgccgacaacggcaacggcaccgcgagcccacaggccagcaacgctttgagccacattgctagaacgtcagttccacggccacggtgtcggtgtaggtgcctgccggcagccccgctttgcccaccgcccgaccatagaggttgacggtctgtgccaccccggtgctggtggcgagggtgatcacaccgtcaatcgccagcagcgcggaatggccgctgtcggtgtagaaatcgtagggcacgaagttgcccgcaccgtcggccaatgcacggctgccaccgggggacgcgccgtcatgtgcaccggcgcgcaccttgaccgctggcgtagtgccactggaacacaggatcgacaacgcgccaccggtgccagtaccgcccagcaactgggcatcggcgttggtgaacaggctgttggtggtgccgaaattcaagctaccgaagttcaacccggtagccgcgcccgaaccgttgacctggcaactggcgatcaatatcaggctggaggtgatctgcccggtcaccgtagttgcggcattgaggctggaggccattgccaggcccagcgcacacacacccaatcgcgaaacaagtacatgcatggttttcatcctcttgagttaccagtccagtgtcaccgtcaacgtgtcggtgtagatccctgccggtaaggcactggtatttgccaccacggagccaaacaccgggatcggtatctgggtgcccttggccacgacaaaattgcgttgttgcccgatgctataggtgctgtgcccctgcgggtcggcggacagtcgataaggaatcatctggcgcccattgctcaggcgccgagtggtgccatcaccgttggtgccgccgtcgatggtcacggtgaagctcgagaccgaggggttgcacgacaccgccaagggcgccttgtcgcccgcggtgacgccagcacccaatggattgttccaggtcggaccctgactgccgaagtcgagcatcgccgtgccgcccgtggggttgaccggcgcgctctccacgcttttgctcacttcgcaactggcggtgatcaccagccgcgcctggataaacccgctggcgacagccgcctgcacgtcatctgccagcaccagcaggccacccatggccaccagggccaggcaacggcttaccatgtcaccgtcaccttgagcaggtcggtgtagcggccgacggcggggatctccttgagcggctcgatgcgaccatagagcggcaggtcgacgaaacctgcgtccggcacccggccgctgagcggcacatccacgggcaacggcacgcgccgcgccgcgtcggcatagatgcgatagggaatgggttgggtcgatgtagtagcactgaggtagcgcacttcaccggtgccaccatgcaggccgccatcgacgcggacctggtacggcgtgtcggggttgcactccaggcgcggttggcgctggctgatcagcgccgcactcaggggcccggccgggtcatccagacgcgggccgctgccgaaatccagtacgcccaattgctcgataccagcgctgcgggtggtgcccaccaactggcaaccgcgctgcacgtcgatacgcacctccacctggagctgtgcaccgtaaaccgtgttgcagagcatcgcgcccatgattgccaatactgctcgtcccttcactgccccaaatccttgtacaggggtgactgctgtgtaggaggttagtcactcagcgagaaactgccagtctggacaggattaccttcacgagatgctttttcgagatagctggcagcgtccttctctattggtcaaaacgcgacgagcgccctaaagtgagcgaccaccgaaatacagagtgacttgcattggccgcgctttccctgatccgtcgcctgctcggccaaaagcccgggccccttgacgcttcgcccattcccgcgttttttcagcaaaaggccgcgcaacagggttacaccctgagcaccggtcaaacccgcgccattgctgccctggcccgggaaacccaacaactgctcgctggccagcccgcccgcagcctgtacctccacggccccgtgggtcgcggcaaaagctggctgctggacgggttcttccaggcgttaccgatcgccgagaagcagcgcgtgcacttccatgattttttcgcccaactgcatcgcggcatgttcacgcaccatgcgcaggacgatgccctggccgcgacgctcgatgagcagttggcaggctgccgggtgctgtgtttcgacgaattccacgtccatgatatcggcgatgccatgctgatcacgcggctgttcaaggccctgttcgagcgcggtgtactggtgttggtgacgtccaactatgcgccgcaagggttgctgcccagccccctgtaccacgagcgcttcaagccggtgatcgacctgatcgccgcgcgcatggaggtgctggaagtcagttcgccccaggactttcgcagcctgccccaggcccaaagcacacaacgttttacctgcggtcaatacgtgtggccgggcaccccggggcagcgggcggcactcgacctgcccgccgcagacgcccctccccgccccctgggcgtcggccatcggaccttgatgtgccgccaccatcaagggcgcagcattgccttcaccttcaacgacctgtgcgaacaactgacggcggtgatggactacctgctgctgtgccaggactacgaccactggatcatcgacggcctgcctcaactggcgaactgcccgattgccgtgcagcagcgctttatcaacctggtggatgtgctttacgaccgcgacaagcacctggtactgatcggcgaattaccgctcgaggttgccttgagcggccaggccatcgacctggcccgcaccgccagccgtcttggacaattgcagcaggcctccccgcaacacacccccgacccggtatcatgagcgcctttcacgccttcttgccgagtgaccgcgccgttcatgaataccctcgcccaactcaaggccggccaattggccggcatcacgcgcctggacctgtcctgcgggctgaccgaattcccccgggaaatcttcgagctggccgactccctggaaatcctcaacctcagcggcaatgccctgcgcagcctgcccgaggacctgcaccgcctgccgcacctgcgtgtgctgttctgttcggacaacctgttcaccgaactgccggcgtgcctcggccaatgcgccaaactgagcatgatcggcttcaaggccaaccagatcagccacgtgcccgccgccgcgttgccgccgctgctgcgctggctgatcctgaccgataaccgcatcagcgcactgcccgaggcattgggtgaacggcccttgctgcaaaaactgatgctggccggcaaccacctggcgcacctgccgcaaagcctggccgactgccacaacctcgaactgctgcgcatcgcttccaatcgcttcacgcgcctgccgcagtggctattgacgctaccgagcctgacctggctggcttacgccggtaacccggtggaaatggcggtgaccgtggcgggtgaagacgccacgccggacattccctggtccgaactggaactggccgaagtactgggcgaaggcgcgtccggcgtgatccgcaaagcacagtggacaccctccaatacgcccgtcgccgtcaagctctataagggcagcatcaccagtgacggctcaccgctgcacgaaatgcaggcgtgtatcgccgccgggttgcaccccaacctgatcaaggtcgaaggccgcgtgatcggccatcccgatgaccaggccgccctggtgatggacctgatcgagccgagttaccgcaacctcgcggccctgccgagcctggcgtcgtgcacgcgggatatctacgcaccggacacccatttcagccttgaagtggcgttgcgcatggcccgtggtatcgcctcggtagcggcgcacctgcaccgccacggcatcacccatggcgacctgtatggccacaatattctgtggaatgaagcaggtgactgcctgctcggggattttggcgccgcatcgttccatgccacggcggacaccgaggaaaccagggcgttgcagcgtattgaagtgcgtgcgttcgggattttgctgggggaattgctggagcgggttgaggaacaggtgagcggtgaatggctgacgctacaagcaaggtgctgtcagcccgatgtgctggcacggcctggattcgaagagatcgaagccatcctggcctctatccaactgcgctgacccgatatgtgagggggcaagccccctcccacatgttgaaggttcagccagccaggccgacgaacatatcctgcacgtcatcatggttgtccaggccttcgaggaaggcttcgacttccgccatctgctcatcgctcaaaccgctcaccgggttcttcgagaggtagccgagcttggccgacagcacggtgaaaccctgctccggcaaggctttctgcacggcgtcgaggtcggtggtctcggtgatgaacagggtggtgccctcttcttcgccgtcttcgaaatcctgggcgccggcttcaatggcggccatttccggatcggcgtccgggctgtccggcgaggcttcgatcaggccgacgtggttgaagtcccaggccacggaaccggaagcgcccagctggcccttgcggaacgccacgcggatttccgccacggtgcggttgatgttgtcggttacgcattcgacgatcagcggcacctggtgcggggcgaacccttcgtaggtcacgcgatggtattgcacggtttcgccgagcagaccggcgcctttcttgatggcgcggtccagggtttccttgggcatcgaggcctttttggcctgttccaccaccagacgcaggtgcgcgttggtcgcggtgtcggcgccattgcgggcggcgatggtgatttctttcaccagcttgccgaagatcttgcccttggcattggctgccgcttctttatgtttgactttccactgtgcgcccatgactcactctctttatgtccatcgcgccgaaacgtctactggccggcgctttgggggcagagtttatagcgcaaaaacgcatcgttccaccaaaaaaccgtcagggcgccaactcgaaaaacacctggatcaggcgcaatgcgcggcgccgttccatgcagccgagcaagtgacggttcaccaggccatcaccctggatcggcacggcgcacacccgcgggtcggggctgacctccatcgacgacaccaccccaacgcccaattcggcagccacggcttccgtcaccgcctcgcgactgtccaactccagcagcaccctgggctgtacaccggcagcgagacaagcaccgtcaaacgtgcgccgggtgatggagccgggttcacgcaacaccatgatcacctcatgcagttgctccaactgaacaccctcggcctgcctggcccacggatgcgccaccggcaccagcgcgcagatccgcgattcggccaaaggctgcaggtgcaggccattgcgcggctcgacctcggtcagcaccgccacgtccgcatgctcggacaacagcgccgccagggtttcctgggcgttgcccaggcgcaggttcacggtgatgcccgggtagcgcgcacgcaggctggcaatcatcggcatcaccaagtgcggaccgtccgccgccacttccaggcgcccggtgagcaattggcgattggcttccagcaggctctgcgcctcgtccaccagaccgaagatcgcccgagtaatggccgccaggcgcgtgccttcctcggtcagttccacgcgcctggcagtgcgacgcaacagcgcgatctggtagtgctcctccagggccttgatatgcccggtcaccgccggctggctgatgaacagccgcgccgccgcacgggtaaaactgccctcgcgggccacggcatcgaatgcacgcagttggaacaggttcatagctatcggcctcactgatagctcgcataacaacaaacaatttgattgatgacaagccaaactgcaatttagacgccgtagattcaaccgatgcttcgcgaggatttgtaatgacgacgcccatcctgctgacccccggccccttgaccacatcgaaccgcacccgccaggccatgctggtggattggggttcatgggacgagcgcttcaaccagctcaccgccagcgtctgcgaacagttgctggcaatcatcgacggcgccgccagccaccattgcgtgcctttgcaaggcagcggcaccttcgccgtcgaagcggccatcggcaccctggtcccgcgcaacggcaaggtactggtgctgatcaacggcgcctacggcaagcgcctggcgaaaatctgcgaagtactgggccgcgatttcagcaccttcgaaaccgccgaggaccaacccaccaccgccgccgatgtgggccgcctgctgcacgccgacaaggccattacccatgtcgcgctgatccactgcgaaaccagcaccggtatcctcaaccccttggccgagatcgcccaggtggtgaaacaccacggcaagcgcctgatcgtcgatgccatgagttccttcggcgcgttgcccatcgatgcccgcacggtgccattcgacgccctgatcgccgcctccggcaagtgcctggaaggcgtgccgggcatgggctttgtcttcgtcgaccaacaggcgctggccgccgcccaaggcaactgccactccctggcgatggacctgttcgaccagcacagctacatggccaagaccggccaatggcgcttcaccccaccgacccacgtggtggcggccctgcatgaagcgctgctgcaatacgccgaagaaggcggcctgcgcgcacgtcatcaacgctacgccaataactgccaggcactgctggacggcatggccgaacggggcctgcgcagcttcctgccggcggacatccaggcgccgatcatcatcaccttccacgccccgcaggacccgcgctaccacttcaaggacttctatgaacgggtcaaggccaagggtttcattctgtatccgggcaaactgacccaggtggaaaccttccgcgtgggctgcatcggccatgtcgatgccagcgacatgcacgccgccgtcagcgccatcgctgacgtactgcaggccatgggtattaccctttcatcgattggagcacacgcatgaactatcaaaaccccaacaccctgcaagccgtgatcctcgattgggccggcaccgtggtcgacttcggctccttcgcacccacgcagatttttgtcgaagccttcgccgaattcgacgtgcaagtctccatcgaagaagcccgtggcccgatgggcatgggcaagtgggaccacatccgcaccctgtgcgaccagccgcaagtcgccgagcgctaccgcaacgccttcggccgcacgcccaccgacgatgacgtgacggccatctaccagcgcttcatgccgttgcagatcgagaaaatcgccgaacactcggcgctgattcccggcgccctcgacaccctcgcccgtttgcgggtgcaaggcatcaagatcggttcgtgctccggctaccccaagcaagtgatggacaaggtggtcgcactggccgccaccaacggctatatcgccgaccacgtagttgccaccgacgaagtgcccaacggtcgcccatggccagcccaggccctggccaacgtgattgcgctgggcatcgacgatgtggcggcgtgcgtgaaggtcgacgacaccgtgccgggcatcctcgaaggccgccgcgccgggatgtggaccgtcgccctgacttgctccggtaatgccctgggcctgacctacgaacagttccgtgcactggacgctgccacactggccagcgagcgcaagcgcatcgaggcgatgttcgcaggctcacggccacactacctgatcgacaccatcaacgacctgcctgcggtcatcaccgacatcaatgcgcgcctggcccgtgggcaaatgccgcagagctactgatagaggtcaacatcacggcacttaccccaggcaaaccgctcaaaaccggcatacagtagaaggactccatcgccaaagaatggagatttgccctgatgagtgaggaacccagcgatgccgtggaaaaactccgatacacgctacagcaccatgtcgattgcgttgcactggttgatggtggtgctgctggcggtggtctacgcctgcattgagttacgcggccagtttcccaaaggcagcggtgcgcgaacgttgatcgtcgagatgcacttcatgttcggccttaccgtgtttgtgctggtgtggttgcgcctgttcgcacgcagcctgggagtggcgccgaagatcgtaccggcgccgccgccatggcagagcctgttggcgacgctgatgcacgttgcgctgtacgcgttgatgatcggcatgccgattgcgggttggctgattgtcagcgccgaggggcattcggtgatgttctatggcatggaattgccgccgctgatcgcggaaaacaaggcgctggccaagcagattgaaggctggcatgtgctgttcggcaagatcggctactggttgatcgggctgcatgcgctggccgggatcgcccaccattacatcctgcgggacaacacggcgttgcggatgatgccgggcaagcgcgctaacccttgaagcctcgctggccttgcagcccgccggtgtggacgaagaccaggcgagtgccgggggcgaagcgcccggcttcgatccgggtcttcaaggccagtaacgccttgccggtgtaaagcggctccaagggtacgccgcaggcctgctgggtggtgtcgatgaagtcgagcaactcggggtcgactttggcgaagccacctcgactggcgtccagcagttcatagcctccctgcacgatggcctcgacgttctgcgccacaccgtgatcgtccggcaccgccatggcgccgtacaccgggtgcgcgcccgcctctgccagtgccaggccggccagggtggtgccggtgcctgccgccagccaccaggcgtcgtaatccgtccagcccacgctgtgcaactgtgcacgcacctgctcgaccagcaccgcgcaacccagggcgcccgcacgaccgccgccgccttcgggcacggggtgcaggttgggatactgctcacgccacggcaaccagaaacccgactcatgccgcgcgcgataaccgccatagcccagccaatgcagctgcatgccgaaggctttcaggtcgaggacggtgggggtgtcttgcggatgcccgcgcagcaggccgacggtagggaaaccgaagcgcttgccagccgcggccagggcatgcagatggttggaataagccccgcccaggctgatgaggccgcgagcggcttgcgcctgcgccaggtgcccggtgagcttgaaccacttgttgccgctgatcagcgggtcgatgcggtccaggcgcaacacggccagctcgacacctctgagccaatccaggtgcagcggttcaagcggtgcgtggggaagccaatcgaagggacccatcgggcgggatctgcatgaaaaacggggcggtagtctaccaccgccccgcccagggtcttacagctcggcggcgaggcgcgagccctggttgatggcgcgcttggcgtccagctcggccgccacatcggcgccgccgatcaggtgcacattctggccggcggcgagcaggccgtcgtgcagttcgcgcagcgggtcctggccggcgcaaatcacgatgttgtccaccgccagcacctggggttcgccttcggcgccaatgcgaatatgcaggcctgcatcgtcgatcttcaggtactcgacactgttgagcatctgcacctgcttgttcttcaagccggtgcggtggatccagccggtggtcttgcccaggccgtcgccgaccttggaggccttgcgttgcagcaggaacacgtcacgcgccggtgcatggggttgcggcttgatcccggccacgccgccacgggcttgcagccgggtgtcgatgccccattccttccagaatgcttcgcggtccaggctggtggaaacgccctggtgcacgaggaattccgacacgtcgaaaccaataccacccgcgccgatcaccgccacacgcttgccgaccggtttgcgctccaggatcacatccaggtagctcagcaccttggcgttgtcgatgcccggaatcgctggggtacgcggtgcgataccggtggccaggatgatctcgtcgtagccacccgccgccagttgcgccacatccacgcgggtgttgaggcacagctccacatgggtggtctgcaatttgcgtttgaagtagcgcagggtttcgaagaactcttccttgcccggcacccgcttggcgatgttgaactggccgccgatctcgctggcggagtcgaacaacgtcacctggtggccacgctcggcggccaccgttgcggcggccaggccggcaggaccggcacccaccacggcaatcttcttgatctgcttgaccggcaggtagttgagctcggtttcgtagcacgcccgtgggttgaccaggcaagtggtcagcttgccgccaaaggtgtggtccaggcaggcctggttgcagccgatgcaggtgttgatttcatcggcgcggccggcggcggccttgttgacgaactccgggtcggccaggaacgggcgcgccatggagaccatgtcggcatcgccctcggcaagaatctgctcggcgatttccggggtgttgatgcggttggtggtgatcagcggaatctgcactgcaccgcgcaacttggcggtgactttgctgaacgcgccacgcggcaccttggtggcaatagtcgggatgcgcgcttcatgccagccgataccggtgttgatgatcgtcgcaccggcgccttcgatggccttggccaactgcacgatctcttcccaggtgctgccaccttccaccaggtcgagcatcgagaggcggaagatgatgatgaaattcgggcccacggcctcacgcacgcggcgcacgatttccacggccaggcgcatgcgattttcgtagctgccaccccagcggtcggtgcgatggttggtatgggcggcgaggaactggttaatgaagtagccttcggaacccatgatttccacgccgtcgtactcggcgacctgggccagcagcgagcaggtgacgaaatcctggatctgcttttcgatgccctcttcgtccagttccttgggcttgaacgggttgatcggcgcctggatcgcactcggcgcgacctgtttggggctgtaggcatatcggccggcgtggaggatctgcatgcagatcttgccacccgccgcgtgcaccgcctgggtcacgatcttgtgtttctgcgcttctgcgtcggtggtcagcttggccgcgccggcatacacaccgccctcgtcattcgggccgatgccgccggtgaccatcaggcccacaccgccccgggcgcgctcggcaaaataggcagccatgcgttcgaaaccgccgggtttctcttccaggccggtgtgcatcgagcccatcagggtacggttgcgcaaggtggtaaaacccaggtccaacggggccagcagatgcgggtaggcagcagcggtcatggtcaagctccacaacggatcatcacggggtgtgacgggctcgtgcggcccgccatcggtttatgtcccacagactaaaaggcggtggatgacggctcaatgactgaaactgacaagttattgatccaaatgcacagcgccccttggcaagcccgcccatgggccctaccctagtcggcgaaccctgcacacggtctgttgtctgttcccccatgcgtaaacttcttgcttttaccgtctccctggcgctggttgccgccatcgccgcgtatctggtctggacccaggagcgccccgtggcgcattacctgtcggaccttcggatcaccctggccgtcaacgaaggcctgcctgctgaccgcggcaacctgctgggcatccagccggagctgtttcccgccgactaccagagcctggaacgcctgcacctgaagctcgcggcctacctgcaaaaagcccgggaccaggggctgatcaacgacaagaccatcgtggtgctgcccgaacatatcggcacctggctgatgctcaccggcgaaaagaacgaggtgtaccaggcgctccatgtgaaggatgcgatgaactggctgtcggtcagcaacccgctgctgttcgcccgcgcctggatcagcgccaccggcgacaaccgcaccgacgacgcctacctgcgcatgaaagcctcgggcatggcgcgggactaccagctgttgttcggcggtctggccaaggaattcggcgttacgttggtggccggctccatcaccctgccgaacccgagcgtgagccagggtcaactgcaggtcggccatggcgccttgtataacgccagcgtggtgtttgccgccgacggcttgccgatcggcgatccgcagcgccagctctacccgatctacgatgagcgcggcttcatcaagcctggcgatgaaaacatcgtcagcgtggtcgacaccccggccgggcgcctgggtgtactggtcggcagcgacagctggtacccggacaactaccgcaagctcaacgaacaaggcgcgcaattgatcgcggtgccagcctttgtgctggggcgcgacacctgggaccgcccttggcgcggcttcaaaagcgtgtccaccccgaccgaaatcagcctcaagcccgaagaactcagtgagggcgaagcctggcgccgtcttacgctgatcagccaacagccgatcagccaggccagcgccggcatgagcgtgttcctgcgcgggcagttctgggacctgggcaccgccgggcacagctttctcagcagcaacgggcaaatcagcgccgatggcgaggcccgtggcgcgcgcttgttgaatatctggttgtgaaaccggtacggctgggggacctgtcggtgggcttcgtgcacagcctggccgatgccatccacagccacggcctggacccgcagccgctgctgctgcaatacggactcgacccggcgcgcctcgccgaagccggtgcacgcttgtcgatcccgcgctacatgcgcctgggccacgccgccatccagctcaccggcgacccaggcctgggcctgcgcatgggccagctcagccgcttgagccaggcgggactggccggtgtcaccgcggcccaggcgcccactgtgcgggaggcggcgcgcgcattaacgcgcttcgaggcgctatatggctccaactatcgcgggcagtcgagcttcgtcgaggatgccgagggcgcctggctgcgcttctactccatcagcccctacaacgcctacaaccgctttgtggtggactcgatcatcgccggctggctgcatcagttgtcgagcctggcccagcaaccggtgcaggcgcagcgcatcgacatcgagttcgaggcgccggagtacagcgaacgctacgacgcgctgggagacgttcacttcggcgccgacgccaatcaactgcgcctcgaccagcacaccctggccctgcgcaacccgcagcactgccccagtacctggaacctgttgttgcagctgtgtgagcgagagttggagcaactgacccgcacccgcagcctgcgcgagcgcattacccgtttgctcgggccgatgctcaatggcggccgggaacccgacctcgaagaagtggcggcacgcttgaagctgccgacctggacgctgcgccgcaaactggccgatgaaggcactcagtttcgcgcgattctcaacgatacccgccgcgacctggccatgacctacattcgcgatacggaactggcgttcggcgagatcgcctacttgctcggttttgcctcggcccaggcgtttcaacgggccttcaggcggtggaacaaccagaccccaggggaatttcgccgcagtcagcggcattccgcctgaagtcggtcttacagctctgtagcgtcgtctgccggttccagcgggtccaactcaatcgcgtggtactcgagcagttcttcctggtaatcgtccatgccggactccttcttgagttaacaggggttgcagataaatgacctgcatcaccagcctaaagtgccgtgatgacgaaaaaatgtcgacgtcatgacgttcctgcactcaagaatcaaacgtagcagccttgtgcggatttagcctctgcgaattactgcgcaggcgtcggcaggggcggaatcgcttctgtcggcgccggcaggtccgggttgctggtggccggcgcgggttccgcctgcggcgcaagcggcgcagcctcggcaggcggcgtgacgggctgggacaccgctggctcttccttcggcggctcggttttctctgccgccggtgcggttttaggttccggcacacccagctcggctttcggctgctcggggatatgcgcggccttcttcacttcctgaggcaggaacacgtccaccagcgcaaagtagcgctcgtagaatttcggcgccgaaacggtctcgctcgccacctttaccatggaatcatcggtggaaccgatcggcatcgataccgaccccagcacgcccacacccaggctcgcggagttgttgaccttcttcagcgcgtaacggtcctgcaaggcgttggcgaacatggtcgagtgattggtgcctttgccatcgtcggcacacaccacgttgaagctgatctgcaggtgggtctcgccggtctgctggaagctcttgttgcccaccaccagtttcggatcgctgctggtgatgatgtagccctggctcagcaaggcacgtcgcgccgcttcgcacgccgccacatcggtgaccgggtaatcgcgggaaaacgtaccggagtcgtcgaaattctcatgttcataaatggcggtcttgggtgacgagcagcccgcggcgcccgccagcaccagcgccagcccgaggctacgcaagtgaaatgatgtcgacattgaaaatcctgaggaaaacggtccgggcggtattgtgcaacagaacgaggccttggcgcgcgcattcctgtcggtaaaacgtcacagccctaccgcgtaccggccgtaggaaaaagccctgcacacatatgatcaataaacacgcgcaatttgaccgaagcatggcgacttgatggccataacatccagaaactgccccggtgttccaggcagtcatccagcaccctttgcagccgcccgtcctggacggcctgattgaccatgtagtctggcaggcaagcgatccccaacccttcgagtaccacatgcttgagcgactcgatcgtggtgctgaccaacggggtgcgcaggactggctccgaggcgccgggcgccaggcgtaacggccagggctccagcttgccggtggcgcagaacttgtggcgcaggcaggcatgcccgttcaagtcctgcggctgttgtggcgtaccgtgctggcggaaataggccggcgtgcccaccagcaccaactggtagtgtcccagatggcgcgccatcaagcgcgaatcttctggcttgccggtacgaatcaccgcatcgaacccttcttcgatcacgtccaccatgcggtcggaaaaatccacatccagctcgatttccgggtaggcgcgcatgaagtcgctgagcaccggcatcagcaagccgcgcacctgcggcacgctgatgcgcaacgtgccacggggcatggcgctggcgtccgtcagctcccgctcggccgcctcgacctcggccaggatccgccgcgaacgctccaggaacagcacgccttcactggtcaacgtgatgctgcgggtgctgcggtgaaacagccgtacgcccagacgttcttccagccgcgcaatgctcttgccgacggccgacgacgacacgcccagcacacgcccggctatggtgaagctacgcgtttctgccacctgtacgaatacagagaggctacccagactgtccatgagcgagtccctggaaattgcggactccaacgtccgataagttcggaaccttagcctgtttttccgtagaccacagccccctactctgtcgacttgcccatttgcatggatagagcgcgatgacctccctcaccgattccgccgtgactgcccgaaaagaaacactgccgctgggaggattactggccctggccagcgccggctttatcactatcctcaccgaagccatgcccgccgggctcctgccgcagatgggcgacggcctcggcgtatcgcccgcgctggtcggccaattggttacgctgtacgccctgggttcgctgctggcggccattccgctgacgctgttgacccgaggctggcgacgccgccccttgctgctggtcgcaatcggcggctttgccctggtcaacagcgtgaccgcgctctccagccactatgggctgaccctggtggcgcgtttctttgccggtgtattcgccggactgctgtgggcgctgttggcaggctatgccagccgaatggtcgcgccccacctgcaaggccgggccatcgcagtcgcgatgctgggcgcaccgctggccctgtcgctgggtgttccagccggcacctttctgggggctgcggttggctggcgcctgagttttgcaatcatgaccggcctgacgctggtgctactgatctgggcacgcctgcaactgccggatttcgccggtgaaccggcggggaaacgcttggggctgcttcaagtgttcagcttgccgggtattcgtccggtgctgtgggtgacttttacctacgtgctcgcccacaacattctctacacctacatcgcgccgctgctggtgccggcgcggattgccgccgatattgaccaggtcctgctggtgttcggccttgcagcgttgctgagcatttggctggcgggtgtattgattgatcggtggttacgcccgttgctgctgatcagttgtgcgctgttcggtctggtcgccttggcgctggcgttctggatgaacctgccggcggctatctacctcgcggtcgcgctgtggggcctggcgttcggcggcctgcctgcgttgctgcaaaccgcactggccaaatcggcaggcgaatcggcggacgccgcacaatcgatgctggtgaccgtgtggaacctgggcatcgcaggcggcggactggtgggcggtgtgttgctccaaggctggggcgtcggcgcattcacctgggcggttgtgctgctgatgctactggccctggccggcgcgttacaggcggcgccccaacaactggcccggccacccttcaaggtcgaacgttgaaatacgctgatacccgcacgcctcgtaaaaacgcaccaggtcgcccgtgccgccggcgtaacagtccacgcgcaggcgcttgaccccggcagcgcgggcacgctcatcggcgaaagccaacagctgccgacccaacccacgcgcacgtgcatcacgtgcggcgatcagcaaacgcacatagacttccggctcagacgctggcggtacgtaaggcatgggctcgcccagcacaagtgccgccagcaaccgcccctcaggcgtttcaaccacccaggcaccgggcatggcacacgcgtctgtgacttgcgctacccgccggggcaatgcggaccagggcgtggtgccccattgggcgttattacccatcccgacaaaccaggcaatcacctcgtcaaacacctgcagcacggccggggcatccgctgcgctggcatgacggatcacccagccttcttttccttgaatagacacgcgcgaaactccttggtcggcgataacgaatgaccagtctagcgcacataaaaaagcccccggtcttttcaggccgggggctttttattcaaaccgacatcagaacttcttgatgtcagccttggtttccaactgcttgcggtaggccgcgaagtcctgctggccgacacgggaggcgaggaagcggcggtattgcgccttttcttcgtccgttggcgcagcggcctcgttgacgccgttcaggcgcacgatgaccaggctaccatccgccagggttacagtggtaaaggtcggcttgtccttggccgcaggcttgggcatgcggaacacggcttgcagcacggcagggtcgatcgcttcctggctacgggtagccgcttcattgaccttccaggcctggccgtcgaccggctggttcagcggggtcttgccatcacgcaagctggcgatcagctcgtcagcgtgagtcttggcagccgcgctggcgcgctccttggccatctgcgtgcgaatcgccgctgcgacgctttccagcggcagttgcgaaggcttcaggtgctctttggcacgcagcacgatgatggtttccgggtccagctcgatggcgctgctgttggcaccctcatccagcacttccggactgaacgcagcggtgaccacggcgcggttggccgcaacaccttcgccaccttcacggccaaacggcgcggaggtgtgtacggtcagtttcaggtcggacgccggctgggccaggtcggaggcttcaaatgccgcatcttccaattgcttggtcgcttcgacataacgctgctcgacctgctgggtcttgagctctttggtcagcttgtctttcaggctggcaaacgtcggcacttgcggtgcctcaacgcccaacagtttgatcaggtgccaaccgaagctgctacgcaccggcgccgatacctggtccttgttcaacgcgtacaaggcggtttcgaagtccggatcgtagacgccagggccggcaaagcccaggtcaccgccattgctggccgaacctggatcctgggagaactccttggccagggcttcgaacttctcacccttggccaggcgtgcctggatttcttcgatcttggccttggcttgcgcatcggtcgtcttgtcgttgacttcaatcagaatgtgcgcggcacgacgctgttcagcgaggttggcgatttctttctgataggcggcctgcagctcatcatccttcaccgtaacctggtcgaagaaggaagacttcttcagctccagatagtcgatgaccacttgatcaggggtcatgaactctttggcgtgctggtcgtagtaagccttgacctcatcgtcggtgagcttcaccgccgcagggttggccttgatgttgacggtggcgaaatcgcgggtctgcttttccaggcgggcgaatgccaggacttcggcgtcggtcacgaagccgctgccagcgatgcctgcgcgaacctggccgatcagcatttcctgggtcagcatctgacggaactgcatacgggtgtagcccagctgacggatcacttggtcaaagcgttcagggctgaacttgccatcgacctggaattccggcgtctgcaggatcacctggtccagcgcagcttcagagaagccaaacttggcgtcggcagcgccttgcagcagcagcttgcgatcgatcagacccttgagggccgcgtcgcgcagcagtttttcgtccagcagcgaagcatcgaaatccttgcccagctgttgcatcagctggcggcgttgcatgtcgacggcctggctcagttcggtctgggtgatttcttcaccgttgaccttggccacgtcctgcttgttgttacccgaagcctggaaaatggcctcgataccggtgaacgccatcaacgcgacgatgatcccgataatggtcttggcaatccagccttgtgaattgtccctgatattttgcagcatgcgtcccccagaaacggttgaacttcaagaataggcaaccgtggagcgtgggtagagtacggatataagaaaggcgcatccaaggatgcgccttctcgcaactggcggagcggacgggggttttcgttctccccccggcttggcgacccgatgcatacctgggtctgctggccgctccgctgccaggtcgaacctgcgttcgacccgggtaggtaaaggcttgatcgaagcttagttaacggcttctttcagggctttaccggctttgaaacctggtttcttggcagcagcgatttgcagtgctttgccagtctgtgggttacggccagtgcgagctgggcggtcagtcacagagaaagtaccgaagcctaccagtactacggagtcgccggccttcagagcgccagtgacggattcgattactgcatccagcgcacggccagcagcagctttcgggatatcagcggatgcagcgatagcatcaatcagttccgacttgttcactctaagtccccttatatatctattgagtatgattctaagttttttggtgaaagcaaaaaccagtgctgaatggcctacagacacttaagagccgctttataacaagggctctaaaaagctgtcaaggaagcccccaggctttaacacattaatgcgtgctaattctttccttggaatcagactcacgtttttcgtccttagcaactatctccggagccacatccggcaagggctccggcgcgtattgcagcgcaatttgcaggacctcgtcaatccatttaaccggtttaatctgaagatcctgcttgatattgtccggaatttccttcaagtcgcgaacattctcttcaggaatgatcacggtcttgataccaccccggtgtgcagcaagcaatttctctttcagaccaccgatagccaacacctgaccacgcagtgtgatttcgccggtcatggcgacatcggcgcgtaccggaatgccggtcaatgccgagaccagggccgtgcacatgcctacgccggcgctagggccgtctttgggggtcgccccttccggcatatggatgtgcgtgtcgtgcttctcgtggaagtccagggggatccccaggcttctggcgcggctgcgcaccacggtctgcgcggcagtgatcgactcgaccatcacgtcaccgagggaaccggtcttgatcaattggcctttgcccgggatcacggcggcttcgatggtcagcaactcgccgcccacctgggtccacgccaggccagtcacctggccgacctgatcctgctgctcggccaggccgtagcggaatttgcgcacgcccaggaagtgttccagcgaatcggccgtgaccttcaccgagaagcgtttttccagtgcatgttccttcaccgccttgcggcagatcttcgcaatctggcgctccaggcctcgtacaccggcctcgcgggtgtaatagcgcacgatgtcacggatcgcctcgacctcgaactcgatctcgcctttcttcaggccattggccgacgtctgcttgggcgcgaggtacttgacggcaatgttgatcttctcgtcttcggtgtaacccggcagacgaatcacctccattcggtccagcaacgcgggcgggatgttcatggagttggaggtgcacaggaacatcacatcggagaggtcgtagtcgacttccaggtaatggtcgttgaaattgtggttctgctcggggtcgagcacttcgagcaaggcagacgccggatcgccacgcatgtcgctgcccattttgtcgatttcatcgagcaggaacagcgggttgcgcacacccacctttgtcatcttttgaatcaatcttcctggcatcgaaccgatgtaagtgcggcgatgaccacggatttccgcttcatcacgcacaccgccgagggccatgcgcacgaatttacggttggtggcgttggcaatcgactcggcgagtgaggttttacccacacccggtggaccgaccaggcacaacaccggcccgcgaatctttttcacgcgtttttgcacggcgaggtattcgaggatacgttccttgacttcttccaggccatagtggtcggcatcgagaatgtcctcggcacgcgccaggtccaggcggaccttggtctgcgccttccacggcacctgcaccagccagtcgatgtaggagcgcaccacggtggcttcggccgacatcggcgacatctgcttgagcttgttcagctccgcagtggccttggtcagggcatctttcggcaggccggcggcatcgatgcgctttttcagctcttcaatttcgttgtggccttcctcgctgtcgccgagctccttctgaatggccttcatctgctcattcaagtagtactcgcgctgactgcgctccatttgtttcttcacgcgaccacgaatgcgcttctcgacctgcaacaggtcgatctcggcatccagcagtgccagtacatgctcgacacgggccggcaggtcgatgatttcgaggatgtcctgcttctgctcgatcttcagcgccatgtgcgcggccatggtgtccaccaggcggcttggctcatcgatgctgttgagggaggacaggacttcagccgggactttcttgcccaactgcacgtactgctcgaactgcgagagcaggctgcgtacaaacacttcggactcgcgctcaggggcctcgacttcgtcgatcagcgccacttcggcgcgcaggtggccgtccacctccatgaaccgctcgaccgcgccgcgctgctcaccttccaccagcaccttgacggtgccatcaggcagtttgagcagttgcagcacggtcgcaatggtaccgacgcgatacagggcatcttcgcctggatcatcatcggcaggatttctctgggccaacagcaggatctgcttgtcgcccgtcatcgcggcctcgagggcttcgatagacttctcgcgccccacgaacagcgggataaccatgtgcggatagacgacgacatcacgcaacggcaggagaggcaattcgatggttgtcttcatgatttcgcctctatgacagttcaaaaattagcttgaaaccaagatgggggctgcatgcaaaaaaaacaagcttattgccagcagttaaacgcagtaaacgctccggcgtaaaaaacgccgtaaaaacaaaggggcccctggaggccccttgtttataccgacactgcgaaacgcttacgcgtcgggcgcagctttggcagccttggcagccggctcactgttttcatagatgtacagtggcttggacttgccttcgatcacgctttcgtcgatcaccactttactcacctcggactgcgaggggatttcgtacatggtgtcgagcaacacgccttcaagaatcgaacgcaggccacgtgctccagtcttgcgctccagtgcccgcttggccactgacttgagtgcatcggtacggaactcgaggtctacaccttccatctcgaacaacttggcgtattgcttggtcagggcgttcttcggctcggtgaggatctgaatcaaagccgcctcatccaattcgtccaacgtggccaggaccggcagacggccaacgaattccgggatcagaccgaacttgaccagatcgtcaggctcgacttcacgcagggactcgcccaccttcttgccttcttccttgctgcgcacttctgcactgaaaccaatgccaccacgggtggaacgctgctggatcactttttccaggccggagaacgcgccgccacagatgaacaggatgttgcgtgtatcaacctgaaggaattcctgctgcgggtgcttgcggccgccttgtggcggtacggaagcgaccgtgccttcaatcagtttcaacagtgcctgctgcacgccttcaccggaaacgtcccgggtgatcgacgggttgtccgacttgcgcgagatcttgtcgatttcgtcgatgtagacaatacccatctgggccttctctacatcgtagtcgcacttctgcagcagtttctgaatgatgttctcgacatcttcacccacgtagccagcctcggtgagggtggtggcgtcggcgatggtgaacggaacgttcagcaggcgagcgagggtttctgcaagcagggttttacccgagcctgtaggaccgatcagcaagatgttgctcttgccgagttcaacttcgtcgcctttcttgtcacgctggttcaagcgcttgtagtggttgtataccgctacggccagaaccttctttgcacgctcttgaccaatcacatactggtcaaggatgccgctgatttctttaggcgaaggcaatttatgcgcgctgctctcggcctgggcttcctgcacctcctcacggatgatgtcattgcacaggtcgacgcattcgtcgcagataaacaccgaggggccggcaatcaatttgcgtacttcatgctggcttttgccacagaaggagcaatagagcagcttgccgttgtcctcgccgttgcgggtgtcagtcattcgttcgatccaaatccgataggcttgcaacacaagatgaaggcttatgcgggctttttcaagcccgccagtggtcggacatgccgaccagccctattttgagcggcttatattaagcgggacgctgggtgatcacttcgtcgatcaggccgtatgccttcgccgcatcggcactcatgaagttgtcgcggttggtgtcgcgctcgatttcttccagggtgcgcccgctgtgcttggccatcaacgtgttgagacgctcgcggataaacaggatctccttggcgtgaatctcgatatccgacgcctggccctggaaaccgcccagtggctggtgaatcatcacgcgcgagttaggcaggcagaaacgcttgccctcggcaccggcagtcaacaggaacgcgcccatgctgcaggcctggccgatgcaggtggtcgacacgttcggcttgatgaactgcatggtgtcgtagatcgacatgcccgctgttaccgaaccgcctggggagttgatgtagagatggatgtccttgtccgggttttccgcttcaaggaacagcagctgcgcacagatcaggttggccatgtagtcctctacggggcccaccagaaagatcactcgctccttgagcaggcgcgagtagatgtcgtaggcgcgttcgccacgagcggactgctcgacaaccatcgggaccaggccgccagcggcctggatatcagagttctgctgaatataggaattacggaacatgctctgcagttactcccaaatagtcatgtcttgaaaacgcataagccagcgcgaggctggcttatggttgaatttccaacgagttggacaatcagtcggcttgtgctgcttccgccggtttgactgcttcttcgtaagagaccgctttatcggtcaccttagccttctgcagaacagtatccacaacttgttcttccagcacaaccgaacgcacttcgttcagttgctgatcgttcttgtagtaccaagccacgacctgctcaggctcctggtaggccgaagccatttcctggatcatttcgcgaacgcgatcttcgtctggcttgaggtcgaactgcttgaccacttcagccacgatcaggcccagcacgacgcggcgcttggcttgctcttcgaacagctcggccggcagttggtcaggcttgatgttgccaccaaactgctgaacagcttgaacgcgcaggcgatccacttcgttggacagcagggccttaggcacttcgatcgggttggcggccagcagaccgtccatgacctggttcttgaccttggatttgatggcctggcgcagctcacgctccatgttcttgcgaacttcggtgcggaaaccttcgataccggtttccttgataccgaattgcgcgaagaattcttcgttcagctctggcagcttaggctcggaaacggtgttgacggtcacggtgaactcggcggctttgccagccaggtccaggttctggtagtcagcagggaaagtcaggttcagaacgcgctcttcgccggctttggcgccaaccaggccgtcttcgaaacccgggatcatgcggttggaacccagcaccagctgagtacccttggcggagccgccagcgaagacttcgccgtcaaccttgccaacgaaatcgatgttcagctggtcttcgttctgggcagcacggtcggccacttcgaaacgggtgttctgcttgcgcaggatttccagcatgttgtccaggtccgagtcagccacttcggcgctcaggcgctcgatggcgataccgtcgaaaccggccacttcaaactcagggaacacttcgaatacggcaacgtattccaggtctttgcctgcttccagggacttaggctcgatcgacggcgaacccgccgggttcagcttttgctcagtgaccgcttcgtagaaagaagcctggatcacgtcacccacagcttcctggcgcgcatcggcaccaaagcggcgcttgatttcgctcattggcactttgcctggacggaaaccagcgatcttggccttctgggcagtctgctgcagacgcttgttgaccgcagtctcgatacgctcagccggcacggtgatgctcaggcgacgctcgatagcagtagtattttcaacagaaacttgcatggatattcctcgttgcacagacgttagccggccatttccgaccccaatcaagggcatgcattctagtgggtcaaactcaagaagtcaccctactgcaaatacacccgaaaacagccagcaatttatcggtacgaaggcactgatgcaccccgccccggtgacaaatacagcccatcacgccagggctctgcgccgccccttctatatatagaagaagtcgtcatccatctccctgacggccaacccttcaaacgggactggcaggcagcgcagcatcatcgagatacataaatacgacgaaacgccctgccgttgcgacccagtgactgcgaccgcggaatattcgaaccgctaaaaccaaaaaaggcgccagactgttaaatctggcgcctttcgaatatggggtggacgaaggggatcgaaccctcgacaacgggagtcacaatcccgtgctctaccaactgagctacgcccaccatattgcgttaacaaagaaaccaaaccacttctttgtctagccttaccctgcttctcaacaaggcgaagctttatttggtgcggatgaagagactcgaactcttacgcctcgcggcgctggaacctaaatccagtgtgtctaccaattccaccacatccgcgcttgaagctcttaaagcaaaggcgccagacgattaatctggcgccttttaaaatatggggtggacgaaggggatcgaaccctcgacaacgggagtcacaatcccgtgctctaccaactgagctacgcccaccatctgacgctacttgtgccaaagctgcctaatggcgcacccggcaggactcgaacctgcgaccatccgcttagaaggcggatgctctatccagctgagctacgggcgccttattaatctgtactcttggaggattacaaactaagtgcttccagccttgcagaacaacacgctattctgctcgaccttcttaaccagtgctaggctgtgcccgacaagtgcgacgaatagtatagacgccctccaaacccgtcaaatcttttttgaaaaaaattcattttatttaaggggttagggcaatttgcagaccaagcgcctttgccctcacgccttggcatgcgagaatgcgcgcacttttcttccccctctcgatggttaatcacgcgtaatgactgcacaacttatcgacggcaaatcaatcgccgccagcctgcgccagcagatcgccaaacgagtcaccgagcgcagccagcaaggcctgcgcacgcctggcctcgcggtgatcctggtcggcagcgatcctgcctctcaggtttatgtctcgcacaagcgcaaagactgtgaagaggtcggctttatttccaaggcctacgacttgccttccgagaccacccagcaggcccttaccgacctgatcgacggtctcaacgacgacccgaagatcgatggcatcctgctccaactgcctctgcccgagcacctggacgcctccaagttgctggagcgcattcgcccggacaaagatgtcgacggcttccacccttataacgtcggccgcctggcccagcgtatcccgctgctgcgcccatgcacgccgaaaggcatcatgaccctgctggaaagcaccggtgtcgacctgtacggcctcgacgccgtggttgtcggcgcatccaacatcgtcggtcgcccgatggccatggaactgctgctggccggctgcaccgtgaccgttacccaccgcttcaccaaggatctcgccggtcacgtcggccgcgccgacctggtcgtggttgccgccggcaagccgggcctggtcaagggtgagtggatcaaggaaggcgccatcgtcatcgacgtgggcatcaaccgccaggaagacggcaagctggtcggcgacgtggtgtacgacaccgccctgccccgtgccggctggatcaccccggtacccggcggtgtcggcccgatgacgcgcgcctgcctgctggaaaacacgctgtacgccgcagagaccctgcacacctaataaccgggcgtactgaaaaagccctgccttatcgcagggctttttattgcccgcaataaaccctatttttcttagtttttaagaactttcgtccggttctagaagaacattcgacagtttctgatccatactcctaaaatgtaacggcatttatccaaaacccgtttccgaacggtatttccttactttttagcgagttcatccgcgtgaaaattcgtctctctattgtcagcctattttttgcgtttacaggcaccttcgctcacgccgccgaaaccacccaggccccgcgtgacacctcgaaactgcaaatcgcctccggcagcgccatgctggtagatctgctgaccaacaaagtcatctactccagcaacccggatgtggtggtgcccatcgcctcggtgagcaagttgatgaccggcctggtggtgcttgaagccaagcagaacatggatgagtacatcgacatcaacatcaaggacacgccggaaatgaaaggcgtgttttcccgcgtgaaaatcggcagcgagatgccgcgtaaagaaatgctgctgatcgcgctgatgtcctcggaaaaccgtgccgccgccagcctggcgcaccactatccgggcggctacccggcgtttatcgccgcgatgaacgccaaggccaaggcgctgggcatgaccagcactcactatgtggaacccaccggcctgtcgatccacaacgtgtccaccgcccgggacctgagcaaattgctcgccgccgcgcgtcactatccgttgctcagccagttgagcaccaccaaggaaaagaccgtgtcgttccgcaagcccaactacaccctgggcttctccaacaccgaccacctgatcaaccgcgccaactgggacatcaagctgaccaagaccggcttcaccaaccaggccggccactgcctggtgctggtgaccagcatgggcaaccgcccggtgtcgctggtgatcctggatgctttcggcaaattcacccactttgccgatgccagccgtatccgcaattgggttgaaaccggcaagagcgggtcggtgccggatgtggcgttgcgctacaaggccgacaagaacctgaaaaatcggccgaatgctgcagaagcgcgtcgataaccaaccattaaaaaacggcgcttgatagcgccgttttttatttgcgctccgccaacaccttcagcgcctgggccgccgcccgctccttcccggcctgggccgtcgcgttagccgcatcccgccagcgctgcgcgtcgacattggctggcaactggctcgggcgctgggtgaggattgcccagtttccggcacttttccattttgactcgaagtcgccgaagctcatcaacaggcgccggtccatgcctgagcgcagcaacaccgtgcttttctgctgattgaaccccaccactaccacgtagtgcgcgtcagaccacagcccgccgccaatccgcgccatcaccggataacccgccgccacctgcgccagcaccgccgtcaactttgcatcgagcgggtacaccatcagcccgtactcacgcgccagcacctgcatgttgcgttcaaggtccgcttcgccacccggcaaatgcaacggcttatccagcaaccccggtgtcatgacaatgccttgttgcgacagcatgctggctaacgatgtaggaccgttctgataagcctcgctacgaaaggtcggcacgccattgagttcgacacgctccggcaggcccgccagcctcgacggtgtggaggaacaggccgctaggcccagggcacaagcaagcaacaaggatgtttgaaggttcgaccgtaaccgcaattttctactctcttgatcgactgccggtaatggccctgatcatagcccaatcgcgtttgtgtagggcgcgtggatatagcaaagaagttggttggactcgaccattggtcaatagcaggcaaccgcccggtagctagactgtccattgagaagactgtgtgtgcccgtaggggcgaaaggaggcccgaatgagccttgcaacgacgattttactgctgatctgcggttggctggcggtagccggcgccatgttgtggggggtgttgcgtattacccgccggcaccatcacccccacgccaaacccgttgcacccgccaagcctcacaaggccgcggtgcatcacgcctagcctggcatgcaattgaagtcctgcgtcgccgcgacttccttgccgtgcccgtccatcaaggaggcgcgcacggtggtgcccaggctggattccaccagggtgtagtgctcacccgctctgaaatgcttgtactcgacacgtccctcgcagtcctgctggttgtcgtcgccgggttcttcctcgaacagcgtcacatccaggcgatgatcccccggcggcacttcaaaaaagcgtccgtcatccacgcgcttgccatctacccgctcggccatcaggtcattcggcgcttcttctttcagaccaatccacgcttcgctcgggtcagccttggggatcgggccggcgcatgccgacaacaacagcgcagcaccgagggcaggaatcaacaatagaggtttgagtgacatggcagggctccaaaacaggacaaggcgtccaatgggttgcaagcttgaggagcagccctttgtagaacaaatgaatacatatgaaacgatcttcagcccttacctaaatgttccttcacctggctgaaaggtgcgtgttaggtgggtcgcgtgagactgccggggtttgcaatcctgctcctttcggaggtttcacgcatgctcgggctggtaaagaccgcactgcaaaagccatacacctttatcgtgttggccatcttcatctgcatcatcgggccgatggcggccctgcgtacccccactgatgttttcccggatatcggcatccccgtggtcgccgtggtctggcagtacaacggcctgtcgccggacgccatggccggtcgggtgatctacacctacgaacgctccctgagcaccaccgtcaacgacatcgaacatatcgaatcgcaatccttgcccggcatgggcatcgtcaagatcttcttccagcccggcgtggatatccgcaccgccaatgcccaagtgacggcggtttcacaaaccgtgctcaagcaaatgccacccggtatcacgccgccgctgatcctcaactacagcgcctctacggtgccgattctgcaaatggcgttttccagccccagcctctcggaagccaggatccgcgacctggtgcagaacaacatccgcctgcccctcagcgccctgcccggcctggccatgccgacgccgatgggtggcaagcaacgccagatcaccctcgacctcgacccgcaagcgctggctgccaaaggcctgtcggcgcaggacgtgggtaacgccctggcactgcaaaaccagatcatcccggtgggcaccgccaaactcggccccaacgaatacacgatcctgctcaacaacagccccaaggccatcgacgaactcaacgacctgccgatcaagaccgtcgacggtgcgctgatcacgattggccaggtggcgcacgtgcgtgacggctcgccaccgcagaccaacatcgtgcgcgtcgacggccaccgcgccgtgctgatgccggcgctgaaaaacggcagcatttccaccctgtcgatcatcgatggcatccgccagatgctgccgcgcatcaacgaaaccctgccgccgtcactgaagacctcgctgctcggcgacgcttcggtgttcgtcaagcaatcggtgggcagcgtggcccaggagggcatcattgccgcactgctcaccagtgcgatgatcctgctgttcctcggcagctggcgttcgacgctgatcatcgccgcgtcgattcctctcgccgtgctctcggccatcgcgctgctggcggccagcgggcaaaccctcaacgtgatgacgttgggcgggctggcattggccgtgggcatcctggtggacgacgccacggtgaccatcgaaaacatcaactggcacctggaacaaggcaaggcggtgaagaccgcgatcctcgacggcgccgcgcagatcgtcggcccggcgttcgtctcgctgctgtgtatctgcatcgtgttcgtaccgatgtttttgctgcaaggcatcgccggttatctgttccggccgatggccctggcggtgatctttgccatggccagttcgttcatcctctcgcggacgctggtgccgaccctggcgatgttcctgctcaagccgcacacgccggagccaggcgccgggcatcacccggaagatgagttcatcaaccaccacgagggcgagcagcacccgaaaccgcgcaatcgcgtgctgcaatcggtgctgaatttccagcagggcttcgagcgtcacttctcgaatatccgcgacacctaccacagcctgctgaccttggccctaggcaaccgcaagcgttttgtcgtcggcttcctggcctgtgtactggcgtcgttcctgctgctgccaagcctgggccaggatttcttcccggccaccgacgccggcgccctggccctgcatgtgcgcttgccactgggcacgcgcatcgaagaaagcgccgcggccttcgaccgcatcgaggcgcggatccgcgaaatcatccccgccgaagagctggacaccatcgtcgacaacatcggcattccgctcagcggcatcgacatggcctacagcagcagcggcaccatcggtccgcaggatggcgatatccaggtcaccctgaaaaaagaccatgcccccaccgccgactatgtgaaaaaactgcgtgaagccttgccggaaagctttcccggcagccacttcgccttcctgccggcggacatcagcagccagatcctcaacttcggcgcccccgccccgctggacgtgaaaatctccgggcgcaacgacgaagagaaccgcgcctatgcggtagaactggagcgccgcctgcagcatgtacccggcatcgccgacctgcgtatccagcagtccaccggttacccgtcgctgcaggtgaatgtcgaccgcctgcgcgccaatggcctgggcatcaccgagcgtgacgtgaccaacagcatggtcgcctccctcgccggcagttcccaggtggcgccgacgttctggctcaacccggccaacggcgtgtcctactccatcgtcgcggctaccccgcaataccgcctcgacagcctgccctcgctggaagccctgccggtgaccggtgccgacggccagtcgcagatcctcggcggcgtagccaccatctcccgcgtgcaaagcccggcggtggtcacccactacaacatcgagccgaccctggacctgtacgccaacgtacaaggccgcgacctcggcggcgtggcccgcgacgtgcagaaagtgctggatgacaccgcctccatgcgtcccaagggcgcggtgatcagcctgcatgggcagatcgatgcgttgcatgaggcgttcagcggcctgagctttggcctgctcggtgcggtggtgctgatctacctgctgatcgtggtcaacttccagtcgtgggtcgacccgttcgtgatcatcaccgccttgccggcggcgctggcggggatcgtgtggatgctgttcctcagcggcacgtccttgtcggtgccggcactgaccggcgccatcctgtgcatgggcgtcgccacggccaactcgatcctggtggtgagcttctgccgcgaacgcctggccgaacatggcgatgcgctcaaggcagcgctggaagccggctacacgcgcttccgtccggtgtgcatgaccgccctggcgatgatcatcggcatgttgcccctggcaatttccgaagagcagaacgcccctcttggccgtgcggtgatcggggggttgattctcgccaccaccgccaccctgttgtttgttcccgtggtcttcagcctggtccacggtcgtcatcctacccgcgcagttgctggagaaagcccacatgtcgtctgatcacaaaccctcgcgcaagcgtctgatgctcatgggtgtcggcggcctgaccctggccgccctgttggtcgccaacggcctgcacgcccgcaccttgcacgaacagtcggtcaccgcctggaccgagaccgccgccatcccgcaggtgatggtgttccaaccgcagcagaacgcggccggcgataccctgcgcctgcccgcacacttggaagcctggagcaaggcgccgatccatgcccgggtcagcggctacctcaaggactggaaagccgacatcggcacccaggtcaaggctggccaggtcctcgccgagatcgacagcccggacctcgaccagcaactggcacagacccacgcacgcctggtgcaggaacaggccaacgcacgcctggccgccaccaccgccacgcgctggcagaacctgctggccagccactcggtgtcgcgccaggaggccgatgaaaaaacttccaatgccgccgccgccaaagccaacgccgaggccgccgcggccgactacgccaggctgaccgcactggaaagctacaagacgattcgcgcgccgttcgccggcaccatcaccgcacgtaacaccgatatcggccagttgatcaaggccgacaccgacagcgacccggaactgttcaacatcgccgacacccaccaattgcgcctgtatgtgccggtgccgcagaactacgcggcggtcatccaccccggcctggaagccgaattgactgtgcccgagcatcccggcgagcacttcaaggcgcgcctgatcggcgactccaccgccatcgaccgccgttccggcaccctgctcgcgcagttcgtggccgacaaccccaacggcgagttgctgcccggtgactatgccgaagcgaccctgccgatcccggcggacacccatggcgtgagcatcccggccagcgcgttgatcttccgcgcccagggcacccaagtggcggtgctggacgcgcagaatcacgtgcacttgcaggacatccatatcggcctcgacctcggtgaacgcctggtcatcgaccaaggcctgaaacccgccgaccgtgtggtcgacaacccgcccgacgccctgcgcgaaggcgacccggtgcaactggccgacgccgctggaggttcgcatgcgcccaaggcttaagcccctcgttgcactgatgctgctggctctacagggttgctcgatggcgcccacctacaaggtgccgccgattgacctgcctgcgaactatcgcgagcagaccagtgacggcccctggcacagcgcgcaaccgtccgatcaactggcacccgaatggtggcagctctaccacgattcacgcctgaatgacctgcaacagcaactgctcaaggccaaccccgacctagcggcggcactggcacacttcgacgcgtcccaggcgtatgccagccagctacatgccggcctgttcccgcagatcaccgccagcgcgcagccgttgcgccagcgccaatcggattcacggccgctgcgggggaccacgcagccgtcggtgtacaacagcaatacagcgggtttctcgctgagttacgacctggacctatggggcaaaatccgcaaccaggtggcggccggcgatgcccaggcgcaagcatcgggggatgacctggcggtggcgcgcctgagcttgcagcatcaactggcgagcctgtatgtgcagctcaatgggctggatgcacaggcgcggatcctcaacagttcgctggatgatttcagccaggcgctgcaactgacccgcagccggtacgagggccagattgcttcagagctggacctgacgcgagcacagaaccaactcgccgaagccaaggcgcagctggatgaagtccgcgggcaacgcaacctgaccgagcatgccatcggtgaactggtgggcgtggcggccagcgatttctccctgccgccgagcccgcaattgattgcactgccgggcatcccatcgcagctgccaagccatctcctgcaacgtcgaccggacattgcagcggcggaacggcgggtgtttgcggccaatgcgaacataggtgtagcaaaggccgcgtggtacccggatttcagcctgaccgggttgattggcgggcagacgcaaggcgtcggcaacctgctgtccgccggcaatcgctattgggcgctggggccgctggtgaatctgccgatctttgacgggggccgcttgagcgccaacgagcgccaggccaaagccgaattcgaagaggcatcggcgcactaccgcagtcaggtgctgaaggccgtgcgcgaggtggaagataacctggcgcaactgcgggatttgcagcaggaagcgcaggatgaacaggcggcggcggatgcggcagagcatacacaagccttggcgatgaacagctatcaggccggggccgtgagttatctggatgtggtgaccgcgcagacggcggcgctgcaggcgcaaaggacgttgcaggcggtgcagacgcggcagttgcaggcgagtgtggggttggtgacggcgctgggtggtggctggcagccgggtgcttgataaggtgggtcagtcacataactgtcaactgaactaccgcaatcgggggcaagccccctcccacacttgtcctgtgccagacacacaatgtatgaacgccgcagaactaatgtgggagggggcttgtccccttccaccctgctcctgtgccagacacacaatgtatgaacgccgcagaactaatgtgggagggggcttgcccccgatggcgttcttccagacacatcctgccaaaagccagcccgtcagccttttacgcaccgatctagcctctctgaacacaccttgagagggccagggaatggcagatttacccgcttcacatcggctgcgcatcggacgcttcagcgaacccaaccgcatctacctgatcaccaccaacacccacgaacgcctaccgatattcagcgacttccacctcggtcgactggtggtctggcagtttcgcctggctcagtaccgagggctcgcaaactccctggcgtgggtgatcatgcctgaccactttcattggcttattgagttgaaaaaaggctcgttggcggacctgatgcggcaggtaaaatccaagagcacgcggtccgtcaacggcctaagcggacgcaagggaagactctggcaggaaagcttccatgaccgggcactgcgcaaggaagatgatctagtgaagatggcgaggtatgtagtggccaatccattgagagcaggcctggtgaaaaagatcggcgactacccattgtgggatgccatctggatctaacatcacacactgttcaaatgtgggagggggcttgcccccgataacagggtgactgacccaccgctatcgggggcaagccccctcccacatttttttctaccgtatttcaggcggctaacttgccgctggcgattgcggcggaagctgccaccattgcgcgtaatagaaccgcacacccagcagccaggtcatccggcgcggcattctcgatttcgttgtggctgatgccgccctcgcacggtacgaaaatcatccccgccgggccaagttcggcgacgaaaattgcgtcgtgccctgccccactgacgatgtccatgttcgacaagcccaggccattcgccgcattgcgcaccgcgtctacgcagccctgatcgaaatacagcggcgggaagtcagcggtgggctccatctcgaaactgagcccatgcttggtgcaggtgtcctcaatgaccttgcgcacctcactgatcatcgagtccaggcgggccggctccaggtgacgaaaatccagggtcatgcgcacttcaccgggaatgacgttgcgcgatcccggataagcctgcaggcaacccaccgtgccacatgcatgaggttggtgccccaatgcagctgcgttcaccgccgccaccaccgctgccgcgcccaccagagcatccttgcgcaggtgcatcggcgtcggccccgcatgcgcttcaaccccccgcagtttcaggtcgaaccacttctgccccaaggcgccgagcaccacaccaatcgtcttcttctcatcctcaagaatcggcccttgttcgatatgcgcctcgaaatacgctcccaccttatgcccgctcacaggccgcgagcccgcatagccaatcgcattcagcgcatcgcccacgctgacgccatccacatcgaccttggccaaggtatcggccagggtgaatttctcggcaaacacccccgagcccatcatgcatggcggaaaacgcgagccttcttcattggtccacaccaccacctccaacggtgcctcggtctccagcttgagatcattgagcgtacgcagcacttccactcccgccagcacaccaaaacagccatcgaacttgccgccggtgggctgggtgtcgatatggctgccggtcatcaccggcggcaggttggggttgcgtccggggcggcgggcgaagatattgccgatgccgtcgacggtcacggtgcagccggcgtcttcgcaccactgcacgaacagatcgcgggccttgcggtcgaggtcggtgagggccaggcgacacacaccccccttgggcgtggcgccgagcctggccaggtccatcagcgattgccacaggcggtcgcggttgatgtgctgatcggtggattgcagaacgtccagggcagcgttcatggggatctcctcaggctacatttcttcttatggattgacggtgaccggcgtggccccgcgcttggcattcaggccgtaatacaacaacccacccagcgccgaaccggtaaaccagccatagctgtagaaccagctgaacgcatcgctgcccaacgacagcaaggtcagcaccaccggcacgccgaacgcgatgaaaccgctccagttccatgccgggtacaggtcatcgcgatacaggccggccaggtcgagttgctgtttgcgcgtgatgaaatagtccaccaccatgatcccggcgatcggccccaacaggctggaatagccgagcaaccagttggagtagacggtctccaggctcacatcggaaacaatcaggccgagttttttcagcagctcatgggccatcaacgccagcccgaccaggccggtgaggatcaccgccgtggtgcggttgatcagcttgggcgcgatgttctggaagtcgttggtgggcgagacaatgttcgccgcggtgttggtggacaaggtggcgacgatgatcagcgccatggccacggccacccacaccgggctctggatatgcccgatcagggtcaccgggtcggacacgctgacgcccaccagtttcaccgaagcggcggtcatgatcacgccgagggcggcgaacaggaacatggtcagcggcaggccgaaaatctgcccgaggatctggtccttctggcttttggcgtagcggctgaagtcaggaatgttcagtgacaaggtagcccagaaccccaccatcgcggtgagcccggccatgaagtaaccggtgaggctcgcaccctcgggacgcttgggcgggatcgccatcaattcgctgatcgacacgttgggcatcgcccacaccagcaggccgatccccaccgccaccagcaacggtgccgacagggtttccaggcgcttgatcgactcggcgccacgcagcaccacccacaggttcaggcaccagaaaatcatgaagccgatcacctcgcccgtgccgccaagggacttccacccctcgaagatcgagcccaggaacaggtggatcgccaacccgccaaacatcgtctggataccgaaccatccgcacgccaccagtgcccgaatcagacacggcacgttcgaaccaaggatgccgaatgacgagcgcagcaacaccggaaacggtatgccgtacttggtgcccggaaaggcgttgagtgtcagcgggatcagcaccacgatgttcgcgagcaggatcgccatcagcgcctcgcccaccgacaacccgaaatacgcggtgagcaccccgcccagcgtgtacgtgggcacgcagatcgacatgccgacccacagcgcggtgatgtgccacttattccaggtgcgttcgtgcaccttggtcggtgccatgtcgtggttgtagcgagggctgtcgaggacgtcggggccggcgtcgagttcgtacaggccgttgcgctcaatgacttgcgatctgttctgttgcatggccgctccacggttttttcgaattattgttgcgcgcctgcagttgagtgcaggcggccggagtacctcgtaaacaacatgacatcacgggcccggccagccgcctctgcactcaataaccgtgccgacaagcgttaccgcaccctcaccgcttatataacgtgctgatgtttatcagctttccgattgcgccttgggtacttgccgcgttactcaggctaaatagtgcggaagttgtccgaaccatcaggactcaatctggtgcaacacaattatttttatttcccctgcccgtcaagaggcatgtctcaagcgtctgatttgcaataagaaatgttgctcaatttaagaacctgtcaagtgcgtcaaaatggtgagaggtcgctacattttggtgattattgatttttatccttataaatcaatagattgaaaactatataggcttataaaaaatcttcttgcccaatcgaaaaactcgggctagtttctattcctgtcaccgatgacaggaattaaccgaccatcggcaagcagcactacaacacttagaactggcacaagccggtcaagcctgtgaggaactcgacatgtcgctgttgatccgtggcgccaccgttattacccatgatgaaagttaccgcgccgatgtgttgtgcgcagacggtctaatccgggctattggtacgaacctggatattcccgccggcactgaactactcgatggcagcggccaatacttgatgcccggcggcatcgacccccatacccatatgcaactgcccttcatgggcaccgtggccagtgaagactttttcagtggtacggcggcgggcctggcggggggcaccacgtcgatcatcgatttcgtgattcccaacccgcagcaatccttgctggaggcgtttcaccagtggcgcggctgggcggaaaagtcggcctctgactatggcttccacgtggcgatcacctggtggagcgagcaggttcgcgaggaaatggccgagctggtcagccaccacggcatcaacagcttcaagcatttcatggcctacaagaacgcgatcatggcggcggatgacaccctggtcgccagcttcgagcgctgccttgaactgggcgcggtgcccaccgtgcacgcagaaaacggcgagctggtgtatcacctgcaacgcaagctgatggcccagggcatcaccgggccggaagcgcacccgctgtcgcgtccgtcgcaagtggaaggcgaagcggccagccgcgcgatccgcatcgccgagaccctcggcacgccgttgtacctggtgcacgtctccaccaaagaagcgctggacgagatcacctacgcccgtgccaaaggccaaccggtctacggtgaagtcctcgccggtcacctgttgctggacgacagcgtctaccaacaccccgactggcagaccgccgccggctacgtgatgagcccgccgttccgcccacgcgggcaccaggatgcactgtggcacggcctgcaatcgggcaacctgcacaccaccgccaccgaccactgctgcttctgcgccgagcaaaaagccgccgggcgtgacgacttcagcaagatccccaacggcaccgccggtatcgaagaccgcatggcgctgttgtgggacgaaggcgtcaacaccgggcgtctgtcgatgcaggagttcgtggcgctgacctccaccaacaccgcgaagatcttcaacctctacccgcgcaaaggtgcgatccgtgtcggcgcggatgccgacctggtgttgtgggacccacagggcacgcggaccatttcggccaagacccatcaccagcaggtcgacttcaacatcttcgaaggcaagaccgtacgcggcgtgcccagccacaccatcagccagggcaagctggtctgggccgatggcgacctgcgcgccgagcgcggggccggacggtatgtggagcggccggcgtatccgccggtgttcgagcagttgagcaagcgggctgagcattccaggccagtagctgtgaagcgctgagaccgctatcgggggcaagccccctcccacattgaccccattccaacaggatcaacgcggtcaagtgtgggagggcgcttgctcccgatgaggccagtgcaagcaacaaaaaaaccactgcccatcagaggcagcacctcaataaccgtgaggccaacaccgtgatccagaccctgacccacctcccccatcccgttgaagatggagcgaccctcgccagccacttcaccgacctggccacccccctcaacgcccgccaggcccaactggaagcctcgcgctgcctgtattgctacgacgcgccgtgcgtgaacgcgtgccccagcgaaatcgatatcccctcgttcatccgcaacatccacaccgaaaacgtgcaaggcgcggcgcagaagattctctcggccaacatcctcggcggcagctgcgcgcgagtgtgccccaccgaaatcctgtgccagcaagcctgcgtgcgtaacagtgccaaagaatgcgccccagtgctgatcggcctgttgcaacgctacgccatcgacaacgcacacttcagcgaacaccccttccagcgcgccgcgcccaccggcaaacgcatcgccgtggtcggtgccgggcctgccggactggcctgcgcccatcgcagtgcgttgcacggccatgatgtggtgatcttcgaagcccgggaaaaagctggtggcctcaatgagtacgggatcgccaaatacaaattggtggacgactttgcgcagaaggagctggatttcctcttgcagatcggcggcatcgagatccgccacggccagcgcctgggggacaacctcacgttgagcgaactacaccagcaattcgatgcagtgttcctcggcctcggccttgccgcgagcaaacaactcggtttggcgaatgaagacgcccccggcctgctcgccgccaccgactacatccgcgaactgcgccaggccgacgacctcacccaactgcccctggccgaccgctgcatcgtgctcggcgcgggcaataccgccatcgacatggccgtgcaaatggcccgcctcggcgcccgcgatgtgaacctggtgtaccgccggggcctggcggacatgggcgccacccaccacgaacaggctatcgccaaggccaatcaggtgcgcctgctgacctgggcccagcccgaagccgtgctgctggatgacctgggtcatgtacgcggcatgcgcttcctgcgcacgcacatggaaaacggccgcctgcaccctaccggtgaaaccttcgaactggccgcagacgcgatcttcaaggccatcggccagggtttcgacaacgaggcgctgcacgacccgctggccgagcaactgcaccgcgtcggcgaacgcattttcgtcgacgagcagctgcgtaccagtgttcccggggtgtacgccggtggcgattgcgtcagcctcggccaggacctcaccgtgcaggcggtgcaacacggcaagctggccgctgaagccatgcacgcccaactcatgctgactgtggaggctgcgtaatgaccgatctctcgattgtgttcgccggtatcaaggcccccaacccattctggctggcctccgcgccgcccaccgacaaggcctacaacgtggtccgtgcctttgaagccggctggggtggcgtggtgtggaaaaccctcggcgaggacccggcggcggtcaacgtgtcgtcccgctactcggcgcactacggcgccaaccgggaagtactgggcatcaacaatatcgagttgatcaccgaccgctccctggagatcaacctgcgggaaatcacccaggtgaaaaaggactggcccgaccgtgcgctgatcgtgtcgctgatggtgccgtgcgtcgaggaatcctggaaaaacatcctgccgctggttgaagccaccggctgcgacggtatcgagctgaacttcggctgcccccacggcatgcccgaacgcggcatgggcgcggcggtgggccaggtaccggagtacgtggagcaagtgacgcgctggtgcaagacgtactgctcgctgccggtgatcgtcaagctcacgccgaacatcaccgacatccgcgtggcagcgcgagcggcgtaccgtggcggtgcggatgcggtgtcgctgatcaacaccatcaactccatcaccagcgtggacctggagcgcatggttgccctgccgatagtcggcacccagagcacccacggcggctactgcggttcggcggtgaagccgattgcgctgaacatggtcgccgagatcgcccgcgacccacagacccagggcctgccgatctgcggcattggcggcatcggcaactggcgcgatgcggcggagttcgtcgccctgggctgcggcgcggtgcaggtgtgcacggcggcgatgctgcatgggtttcggattgtggaagagatgaaggacggactgtcgcgctggatggacagccaaggctacaaaagcttgcaggaattttccggacgggcggtgggtaatacgacggattggaagtacctggatatcaactaccaggtgatcgccaagatcgatcaggcagcctgcattggctgcgggcgttgccacattgcctgtgaggatacgtcgcaccaggccattgccagtctgaaacaggcggatggtacgcataaatatgaggtgattgatgacgagtgcgtgggctgcaacctgtgtcagatcacgtgcccggtggccgaatgcatcgagatggtgccgatagataccggcaagccgtttttgaattggacgcaggatccgcggaacccctatcgggaggctgtgtaggccttaagaccgccatcgggggcaagccccctcccacattttgaataggttcataaatcaaagtgtgggagggggcttgcccccgatgaggccctcagcccccacagagatcaaggctccaacccaatcccccgcaagatcacactggtcaccgtctggatcgccttctcgaactgcatatccgacaacggctggtgatcattcaaaatcttcacctggtgatcaaagtccgcatagtgctgggtcgaggcccagatcatatacagcaggctcgacggctccaccggcaggatgcgcttgtcctccacccactggcgaatcttcgcttccttcatcttggcccagtcgtacaggctttcatccagcgcctcacccagggtcggcgcgccgtggatgatttcgttggcccagactttcgaaccgtacggccgcgtgcgcgagcgctgcatcttggcgcggatgtagctgctgagcaccacccgggggtcatcgaaggtttcaaagctcagggcgtcctgcttccacacttccagcaggtcgaacagcaccgcgctgtacagctcgctcttggtggtgaagtagtaatgcaggttggagcgcggcagttgcacttcttcagcgatatcggccatggcggtgctgccatagcctttttcggcgaagattttctccgcagccagcaggattttttcgacgttgactcgacgaattccgatcttgtgattgcccataagggctccctgacgaagacatgccccagagactaccatccgctctagatcggggcgacaagcgaagtcgaaacttcgtacacttcacgctcctacccattgattggtattgcccaatgttgatcaagaaagccctgactgccgtcgccctgctcgcctccctgttgggcgcctcggccgcatttgcccatgcccacctgaaaaacgccacccctgctgccgacagcagcgtcgcagcgcccaaggacctgcgcctgaccttcagcgaaggcgtcgaagccaccttcaccaaggtgtcgctgagcaaggacggcaccgaaatcgcgatcaagggcctggaaacaccggacgccgacaagaaagtgctggtggtcaccccggccgccccgttggccgccggcacctacaaagtggtgtggaacgcggtctcggtcgatacccacaagagcaacggcgaatacagcttcaaggtcggccagtaacccgtggctaccctgctggtgctgtgccgtttcctgcatttcagcgtcgtgttgttgatgttcggggcctgcgcattcaggccctggctgctcggcgctgcaccgcaaccggcgctggaccggcaacttgagcggatcacccgtggactggcctggctggggctggggtccggcgtcgcctggctgttactgatcaccgcgagcatggccggcagttgggacgcggcgctgcagccggccacggtgcagctggtgctgggcaagaccttcttcggccaggtgtgggtgtggcacctgttgctgaacctgctgctggtgatcgtgttggccaaaccctggccgatggtgcgcctgccagtgatcgcgctgctgctggcgacactggcaccggtcggccatggcgccatgctggacgggctcagcggcagattgctgatcctcaatcaggtggtgcacctggtgtgtgtcggtgcctggctcggcggcttgctgctgttggtgttgatccagcgccaatccccgcctgttgcgctggagccaatcctgcgacgcttcagcggtgtgggttatggcctggtcgccggcttgctggtgactggcttgatcaacgtgcgcgtactcaccgggcaactgtggcccacgccgttattcaacggctttgccctgatcctgttgatcaaggtgctgctggtgctgggcatgttggccctggcgctgctgaaccggctgcgtatcgagcgctgtgaagaacgcttgggcagcctgaaggccagtgtgaagctggagtgggtgctggggattgccgccgtcgccgccgtttccctcctgggcaccttgccgccgatgctgatggttgactgaaacacaccgtcatcgggggcaagccccctcccacattgaacctccacaccgagcaggtcatcgtataacttctacttgacagcgcctgaaaacctcgcaaatatcgcacccaatgttgtacgacaacgtataacaaataataaaaacaacaaaagaaagggagcttcactgtgagttcactcgcgcgcaattcctccgtccgcctgggttttatcggtctcggcagcctggccttcacccttcccctcaacgcccaagccgaaggcttcgtcgacgatgctaaagcgacgctcaacctgcgcaacgcttacttcaaccgcaacttcaccaacccgagcaaccctcagggcaaggccgaagagtggacgcagaacttcatcctcgatgccaagtccggctacaccacaggcacggtgggcttcggcattgatgtgctgggcctgtattcgcaaaagctcgacggcggtaaaggcactggcggtacgcagttgctgccgatccacagcgatggccgcccggccgataacttcgggcgcctgggtgtggcgctgaaaaccaaattatcgaagactgaactgaaagtcggcgaatggatgccggtgctgccgatcctgcgctccgacgatggccgttccctgccccagaccttccgtggcggccaggtcacctccaatgagatcgccggcctgaccctctacggcggccagtttcgcggcaacagcccgcgcaacgacgcgagcatggaagacatgttcatgaacggcaaagccgcgttcacctccgaccgtttcaatttcggtggcggcgaatacaccttcaacgacaagcgcacccaggtcggtgtgtggtacgccgaactcaccgacatctaccagcaacggtatttcaacctgacccacagccaacccgtgggcgactggaccctgggcgccaaccttggctttttcaccggcaaggaagacggcagcgcgctggctggcgacctcgacaacaagaccgccttcgccctcctctcggccaagtacaacggcaacaccttctatgtgggcctgcagaaactcaccggcgacagcgtgtggatgcgggtcaatggcaccagcggcggcaccctggccaacgacagctacaacgccagctacgacaacgccaaggagaaatcctggcaggtgcgccatgacttcaacttcgtggtgctcggcattcccgggctgaccctgatgaaccgctacatcagcggcagcaacgtgcacaccggggcgatcaccgatggcaaggaatgggggcgcgaatcggagttggcctacacggtgcagagtggcgcgctgaaggatttgaacgtgcgctggcgcaactcaaccatgcgtcgggatttcagcaataacgagttcgacgagaaccgcctgttcatcagctacccgatttcactgctctaaaggtgacagaagcagtgcgacgattcgcacttgccccccgtggcggcggaccagaggcatatctgctgcctgacacactgccatcgggggcaagccccctcccacatttgagcaatgccagcctgaagagcgttgacaagccggggaatcaataacgatacttcggcaaagtcatacgacaacctacaacaacaatggaacctacatgaccaccctcaccaccccgcccgttccattcaaccgcctgctgctcaccggtgccgccggcggcctcggcaaagtcctgcgcgaacgcctgcgtccctacgcccacgtgctgcgcctgtcggatatcgccaacatggcgccggctgccgacgcgtccgaagaagtgcagacctgcgacctctccgacaagcaagccgtgcaccacctggtggaaggcgtcgacgccatcctgcatttcggcggcgtatcggttgagcgttcgttcgaagaagtgctcggcgccaatatctgcgggattttccatatctacgaagccgcccgccgccacggcgtgaagcgtgtgatcttcgccagttccaaccacgtgatcggcttctacaagcagggcgaacacctcgacgcccactcgccgcgccgcccggacagctactacggcttgtccaagtcctacggcgaagacatggccagtttctacttcgaccgctatggcatccagaccgtgagcatccgcatcggctcgtcattcccggagccgcagaaccgccgcatgatgcacacctggctgagtttcgatgacctgacccaactgctcgaacgcgccttgtacacgcccaacgtcggccacaccgtggtgtatggcatgtcggataacctcgacacctggtgggacaaccgctacgccgctcacctgggctttgcgcccaaggacagctccgaagtgttccgtgcccaggtcgagggccagccgcccgtagccgccgatgacccggccaaggtctatcagggcggcgcgttctgcgcggccggccccttcggtgattgacccatgaacgccgaattgattgtcgacgcgcgcaatgccgtgggtgaatgcccggtgtgggtgcccgaggaaaatgcgctgtactgggtagatattcccaacggcggcctgcaacgctggagcgccgccaccggccatctcgccgcctggaaagccccgcagatgctcgcctgtatcgcccgtaccgatgcgggcaattgggtcgccggcatggaaagcggctttttccagcttaccccgtacaacgacggcagcctcgacaccacgcccttggctggagtcgaacacccccgtgccgacatgcgcctgaacgacggccgctgtgatcgccagggccgcttctgggccggcagcatggtgctgaacatgggcttgaatgcgcccgagggcatcctctaccgttacgcttccggcgccgtgcccaatgcacaactggacggtttcatcaccctcaacggcctggcgttcagcccggatggccgtacgatgtacgcctcggactcacaccccttggtgcaacagatctgggccttcgactacgacatcgacaccggcacgccctccaaccgccgcgtcttcgtggacatgcacaactacctcggtcgccccgacggcgcggcggtagacgcagaaggctgctactggatctgcgccaacgacgccggcctgatccaccgtttcacccccgacggccgcctcgaccgctccctcaccgtaccggtaaaaaagcccaccatgtgcgccttcggcggcagccgcctggacaccctgttcgtcacttcgatccgtgacgaccagagcccccagtcgctgtccggcggcgtgtttgccctcaaccccggcgttgtcggattgccggagcccacgttcaccctctagctgcatcgctgtgccttgaatacaacaataacaagacaggaatgaacccccatggacttcaaacgcaccttgctcgccgctgcatgcttctccctcgccagcgccgcccacgccctggaaatcaagttcgccgacatccaccccgccggctaccccaccgtcgtcgccgaagaaaacatgggcaaggccctgaccaaggaaagcaacggcgaactgaccttcaagtacttccccggcggtgtgctgggctccgagaaagaagtggtcgaacaggcccaggtcggcgcggtccagatgacccgtgtcagcctcggtatcgtcggcccggtggtgccggacgtgaatgtgttcaacctgccgttcgtgttccgtgaccaggcgcacatgcgcaaggtcatcgacggcgagatcggcgatgagatcctcgccaagatcaccgattcggaattcggcctagtggccctggcctggatggacggcggaacgcgcaacctctacaccaagaaaccggtgcgcaagatcgaagacctcaagggcatgaagatccgcgtgcaaggcaacccattgttcatcgaagccttcaatgaaatgggggccaacggcattgccatggacaccggcgagatcttcagcgccctgcagaccggggtgatcgacggtgcggaaaacaacccgccgaccctgctcgaacacaaccacttccagaacgccaagtactacaccctcaccgaacacctgatcctgcccgagcccatcgtgatgtcgaaaatcacctggaacaagctcactcccgcccagcaggacatggtgaagaaagccgccaaggccgcccaggcggacgagcgcgtgctgtgggacgccaagtccgccagcagcgaaaccaagctcaaggccgccggcgtggagttcatcaccgtcgacaaaaagcccttctatgacgccaccgcgccggttcgcgccaaatatggcgcggcttacgccgacatcatcaagcgtatcgacgccgtccagtaacgccctccttctctagcaaggcccggcgcggtcggtatcgacgcgcccggttacggtgaacgccatgaagaatttactgctgcgcatcaacgaccgcctatacatgacctgcatctgggtcgccggcctctcggtactgggggtcgcgctgatcatcccctggggcatcttcgctcgctacgtcctcggcaccggcgccagttggccggagcccaccgccatcctgctgatgctgatcttcacctttatcggcgccgccgccagctaccgcgcgggtgcgcatatgtcggtggcggtagtgactgaccgcctgccgccacgccaacgccacatcgccgctatcgtcgcgcaactgctgatggccaccatctgcctgttcatgaccgtgtggggcaccaagttgtgcctgtccacctggaaccagttcatgagtgccatccccacactgcgcgtaggcatcacctatatgccgatcccgatcggtgggctgctgacgctcgtattcgtactggaaaaactcctgctcggcgaccagagccagcggcgcgtggtgcggttcgacctggtggaagaaaacgaaggggctgcctgacatggatgcattgattctgttgggcagttttatcgccttgatcctgctgggcatgccagtggcctatgccctggggatgtcggcactgatcggcgcgtggtggatcgacatcccgttccaggccttgatgatccaggtggccgggggcgtgaacaagttttcgctgatggcgattccgttctttgtactggccggggcgatcatggccgagggcggcatgtcacgtcgcctggtggcgtttgccggggtattggtgggttttgtgcgcggcggtttgtccctcgtcaacatcatggcctcgacgtttttcggcgccatctccggttcgtcggtggccgataccgcctcggtcggctcggtgctgatcccggaaatggaacgccgtgggtatccacgggaatttgccaccgccgtgaccgtcagcggttcggtgcaggcgttgctgacgccgcccagccataactcagtgctctactccctggccgccggcggcacggtgtccatcgcctcgctgttcatggccggcgtggtgccgggcctgttgatgagcgcctgcctgatggtgctgtgcctgatcttcgcgaaaaagcgtaactaccccaagggcgaagtcatccccttgaagcaggcgctgaagatcgccgcagatgccctgtggggcctgatggccatggtgatcatcctcggcggcatcctctcgggcatcttcaccgccaccgaatcggccgcgattgccgtgctgtgggcgttcttcgtgaccatgttcatctaccgcgactacaaatggcgcgagctgcccaagctgatgcaccgcacggtgcgcaccatttccatcgtgatgatcctgatcgccttcgccgccagcttcggctacatcatgaccctgatgcagatcccggcgaaaatcaccacggcgttcctgaccctgtcggacaaccgctacgtgatcctgatgtgcatcaatgtcatgctgctgttgctcggcacggtgatggacatggcgccgctgatcctgatcctcacgccgatcctgctgccggtggtgctcgggctcggtgtcgacccggtgcacttcggcatgatcatgctggtcaacctcggcatcggcctgatcaccccgccggtgggcgcggtgctgttcgtgggcgccgcggtgggcaaggtgagcattgaaaaaaccgtgaaggcactgctgccgttctatgcggtgctgttcctgatcctgatggcggtgacctacattccggcgctgtcattgtggctgccgagcgtggtgctgtgatgctgatcgaactggaagacaacctgacccacctcaccctggccccggccgtgggtggcagcatcgtcaattggcgcgtgcgagccagcggccagccattgttgcgccacagcgaccaacaggccctggacacgggcctgccgggcaaactcggctgttatccgctggcgccctggtccaaccggatcgccgaagggggtttcgataaccccgacggctggctggccctcacgccgaacagcctgaccgacccactgcccattcacgggtcggcctggcaacaagcgtggcaggtggtcagccagtcggcggacgaagtggtgctgcaactggtgtgcgacacaccgttcgcctatcgcgctgagcagcggttttgcttgcgcgacggcgagctgagcatcacgttgcgggtgactcatctggcggacaaaccggcgtggcacggcttgggattgcatccctacctgccgcgcacagcgcaaacgcggttgcaggccaaggcctcgcaggtgtggatgagtgccccgtcgaaactgcccacggagctggcaccggtacccgccgcctgggatttccagacgttgaagaccttgccggaaggcctggtggacaacggtttttgtcagtgggatggacattgcctgatcgagcaaccggagctgggctatgccctggagtgccaggccaccggcgccgactacttcctgctgtactgcccgccggggctggggttcttttgcatcgaaccggtgagccatccggtgaatgcccatcacctggcggggcggccgggcctgaaactgctggaacacaagcagtcggtacaactcaatttcaagctgaaatacatacaacatgtgggagggggcttgcccccgatggctgagtgtcaggcaacagatgtttgactgataaaccgctatcgggggcaagccccctcccacagttttgatttgcgttgtgtcagggtggagcgtttttcaggcgcccggcagtgtcgatactgacgaccaccgacaaccccggccgcaatcgctcgctctcggcctggttcgggtccaccgtaatccgcaccggcacgcgctgggcgatcttcacgaagttgccggtggcgttatccgcctgcaacaggctgaactccgaaccggtggccggggaaatatgctgcaccgtgccgtggaatttgcggtggttcaaggcatccaccgtaaaggtcaccggctggccgacctgcacgttgtccatctgggtttccttcatgttggcaatcacccacagctgcggcggcaccagcgccatcagttgcgcgccggagttgacgtaggcacccaggcgcacgccaatctgccccaactgaccgtcacgcggcgcagtgatgcgggtgttggacaggtcgatacgtgccagctccaccgccgcctcggcactcgctacggcggcttccagggagccacggttgacgatcaccgtctgcaggtcctgccgcgcgatttccaggctggcctgggcttgcgccacggcggcgatggtctgcgcattggcggcgcgggtcacgtccagctcgcgtttggacaccgagccgtcgctgatcagttcttcattgcggcgcaaatcggccgtgcttttgcgcgcctgtgcctggctgtccaccaaggctgcctggcgcaacttgatggtcgcttcggcgctgttgcgctgctgcaccacattggccagcgaggccttctgcaccgccagttgcgccagcgcctggtccaggcgctgtttgtagatgcggtcgtcgaggcgcaccagcaggtcgccggccttcacgtattggaaatcctgaaccggcacttcaaacacatagccgctcagttgcgggccgatgatcgtgacctgcccacgcaccagggcgttctcggtggtttccacggtgctgctgaacggcggcaattgccaggcatacagcacgatcagcacgccgacgatggcaatcgcggcaaagcccagcgatgagacgatgcgcacccgcagggagcggggctcggtgaccgaggcgccgggcggcgtggtgccttccggggtggcggcgatggcgttggtggtcgtggtggtggaagtcggttcggtcatgaagaagcgccgctgggttgaacgggaggggctgctgttttggtcgtgctcatcagccacaggctgcggataaagatccagatcatggtcagtatcgcgatgatcgcgatcagcatgaagacatcgttgtaggccatcacgttcgcctcacgggtcgccgccgtagccaggctgcgaatgcccatgaggttgcgcaactcggggtcggcgacaatgccgccgtaggccgagccgccgctttgcacccgcgcggccacacgcgggtcgagcagggtcaggtgctcgacgatcatgctggagtgatatttctcgcgcacgatctggaacgtgcccagcaacgccgcgccaatcaggccgccgaggttctggcagataccgaacatcaccgagaaactcaccaggttgcgcgggttggtcagcacgttcttcgtgcccaataccatggtcggtcccaggaagaacgtaccgccgaagcctagcaggaactggctgatatacaggttctgcggccgggtcaggttgctggaaaaactgtccatcaccgacccggtggccatcagtgccagggaaatcaccagcggcatcaacaggtgcgccgggttgatggtcaacgcactcaccgccagcccggcaatcgcccctgcgagcatcaccacatacagggtgtgcatctgctggtagctcatgttcaacatctgcatgaaacccacggcgccggtggactgctcggacaacaccatgcggatcaggatcaccgccagcgccaggcggatcatcacgccgctgcccagccagcgggtcatcagcatcgggttggcgcggttatgctcgatggccagcccggccatgatcagcaccagggaacaggccgaggcgatgccgatccacggtgcttccagccaccagtcgatgcgacccagggacagcacggcgcagagcaaggcgacaccggtggcaaggatggcgaaggtgacgaagtcgagtttttcaaaggtcttgaagcggtcgccgggcggcaacttgagcaagaacacgcagcccaggcagatcagcgccaggcccagctcgaacagatacagcccgcgccattcggcgatttgcagcaggtcttcggagaacagccgtgccaatggcaaggccaactgcgccgtgcccaaccccagcaccagggacttcaagcgccacttggccgggaaggcctggatcatgtagtacaaacccagcgaactcagcgccgcgcccaccatgccatgggccgcccgcaccgcgatggccgagctgaggtcgttgacgaacaagtggccgaaagtcaccagtgcgtacagcaccaggaacacctcggtaaatgcacgcagcccgaactgctggcggaacttcaccagcagcaggttcatgcacacattggtcatcacataggcggcgggcagccaggccatttcggcggtggtcgcgcccagtgcaccttgcaggtattgcaggttggcgatgaccagcgcgtttcccaacccgccagtaatcgccaccagcacgcccaccatcgcgaacagccaacgcttgtgcgtcgggtgcagcggcgtagacggcgaaccgggcaggctcgggcgctcgtggggctcccaggtgtggggggtgtatttgttcattcgatgactcaggtaaacccatactcagagacagtaaacctgagcggagttcatcttgccatgtcgagggcataattgatgcgaagaacaggcatcacctgaaatgtgcgagggcaagtcgactcgtcgccctgcccccctgggatgtcctgcgtattcagatccagccgagccaactccagtaggtcgcagcgaataccagcatcaacaggtagccaaccagcgtcaccagaacccccaccttggcgaactgccgcgccgtgaacgttccggtccccaggcacaccatgttctgcggcgcattgatcggcaggataaacccgtagctcatcacaaaccccaagagcatggtcatgcccaaccggctgaaatcccccggcaaggtctgcaacaccgcgatcaggatcggcagcaacgccgaggtcaacgcggtggcgctggcgaagcccagatggatcaggatcaggaacgcaccaagaatcgcaaacacacccagcggccccacctggtcaagcccggtatgcgccaccacttgcgcgcccagccattgcccggcctgggtggtcagcagcgccgttcccaggctgatgcctaccccgaacacgatcaccgttccccacggaatgcgcgactgcacatccttccaggtcatcacgccgatacccggcaataacaggaacaccaggccggcgtaggtggtcgaggtggtgtcgaaactgtgcaggcgcccttccgtggcccaggccagtagcagcaacaccgaaacgctcaacaggcgcttctgcgcgccggtcatcggccctatctccaccagcgactgcgccaccgcctctttaccgccggggatgctgtcggtctccggcggcagcaacttgagcacgaggaacagcaacaccgccgacatgatcaacgcccacggcgcgccggcaatcagccagtcgatccacgacacgcgctggccaagcatcttgtccatgaaaccgacggtgagcaggttctgcgcggcggcggtctggatgccgacgttccagatgctggtgccctgggccaccacgatcatgatgccggcggcgatattcgagcgtttgtccacgccgaacgcggcgatcacacccatcatgatcggcaccacgcaggcactgcgcgccgtggcgctgggcaccacgaggctgagcagcaccgtcaccgcaatcgcccccagcaggatgcgccgggtgctggtgccgacccggctcagggtcaccaaggcgatacgccggtccaggccggtgtgggtcatggctgctgcgataaacagcgccccggccaccagcgccagcgccgggttggaaaacccggtgagcgccatgctgatcgccgggctggtgccgatcacatgcgcggggtcctgcaacgacggcgcggtgcccagcagaaaggccatcagcgacgtgatcatgatcgcactggcttcataggacaccgcttcggtgatccacaccaccacggcaaacgcgaggatcgccagcatgcggtgcccggcgaccggcaagtcggcgggcaccggcaacagcagcaccccggccatcaccaacacggcgacgaccaggcccaggggtaatttgaaagatgccgcactcatgggccactccaaggctctagatcaggccttgagcatgggctaaaagcacctgcgacgtgttgacctaggccaacaactggctcaacacggcccgcaacttgccgggtttgaccggcttgttcagcaacggcgcttccaaccggcgcaacgccctgcggcactggtcggtgcggtcggcggtaatgatcacggccgggatgttcagttcgaaatgctcacgcaggtgcttgaccaccgcacaccccaccaccccatggtcgaggtgataatcggccaggatcagttccggcgccctgccctccaacgccagcaacgctccggcctggtcggtggcggtgaccacatcacagccccattgcccgagtagcgcgcgcatgctgtcgaggatgctcacctcgttgtcgatcaccagcagacgccgtcccggcagcgggttgccggtggtcggctgggctggcaactggctgatcggcagagggatctcggtgctcaacggcacctcgatactgaacatcgagccacgtcccggccacgagcgtacggcgatggggtaacccaggatctcggcgatccgctcgacaatcgccagccccagcccaacgcctttacggtccgctgcgcggccgacgtcgagctggttgaactcgaggaagatcgcctccagccggtcctgcgcaatcccgcgcccggtgtcccagacctccaggcgcaggcaatcgccacgcttgcgcgcgcccaacaggatgcaaccttcgtcggtatagcggcaggcattgctgaggaagttacgcaaaatccgcgtcagcaagcgcaagtcggtgctgatcgcatagcagcccgtgtgcacccgcaggttcaaccccgccgcctgggccaccgactggaactccgagaccagcggcgcgaacagttcgtcgaggcggtacagcgccacatccggcttgaccgccgcctggtcgagccgcgagatgtccagcaagtcggtgagcaagtcctcggcgccctccagcgcctgatgcgtgcgctccaccagcacctgctcgacgctgggcaactgccgttcgcgcaaggtggcaatcaacaagcgtgcggcgttcaacggttgcaacaggtcgtggctggcggcggcgaggtatttgtccttgctgcggttggcggcctgggcggcgtcgcgggcgtcgcgcaggtcctgttcgatctgctcgcgctgggcgatctgctgttgcaggttgtggttggcttccagcagttcatcggtgcgtgcggcgacccgctgctccaactcgtcattgagacggatatagcgcttgcgctcagcctccagctcatccagccgcgccgtgagttccgggtaatggctcttgcgcgccgactggtcgcccagccccagcaacccggcgagtgcgcgttgctggtcgtcagagagcttcgccatagacgacctcgacgtcacgctggctcgactccctcgggttggtgaggatgcacggatcgcccatcgcatgctgggacaggaacggaatatccgccacgcgcacgccatgcaggcccagggtttcgtggaagccgatcgcccgcttgagcgcgatcaaatgctccaccagccgcgcgcagatctgccggtgattgaggccgcgacagtcgatgccaaacgtctcggcaatcaccttgaaacgctccggcgccgagctgtagttgaacgccaccacatgctccaccagcaccgcgttgcacagcccatggggcaggtcgaggaagccgccgaggctgtgggacatggcgtgcaccgcgccgaggatcgcgttggagaacgccagaccggcctgcatgctgccgagcatgatcttctcgcgcagggcgatgtccgtagggttggcgatcatctgcaccaggttgccgttgatcaggcgcattgcctccagcgcatgggggtcggtgagtgggccgtggccggtggaaacgaacgcctcgatcgcatgcaccaacgcatcgatgccggtgcaggcagacaggaacgggtccatgctggcggtggtttccgggtcgatcagcgacacatccggcaccaccgccttgctgacgatggagaacttcatgcgttcctgctggttggaaatgatcacgaactgcgagacatccgccgaggtgccggcggtggtgggaatcaggatcagcggcgggctgggcacgcgaatggtgtcgacgccttcgaactcaaggatgctgcgcccgtgggccaccacaatgccgatggccttgccgcagtccatggggctgccgccgccgatggcgacgatcacatcacagtgatgttcacggtacacctcggcgccggtcattacctcttcgacacgcgggttgggcgagacggcgctgtacaggcagtagtcgatgccgagggcttgcaggctggcttccacatcggccacccaaccggcggcgatcacgccggggtcgctgaccaccagcaccttgcgcgcgccgaaggtcttggcgtagttaccgacgttgtgccggcaaccggctccaaagatgatttcaggcgagacgaatttacgcaggaggctcagatttgggctcattggaaagcctgtttttattattttggaagaatgcgctcaacactaaccgatccggctgcgaatgcaatcagaccaaagaggcatccttccgacagtacccgcgatcaacggctagcgaagtacatggtcacttcgaagccgatacgcaggtcggtaaatgcaggtttggtccacatgggggcagtcctcgggttgggccggaagattccggtggggtcattaatgcatggggggatggggtagcgaatgctactttcgaagtattaagcgcactgcattagtcgcgaatgtgcagagaccaaaatgtgggagggggcttgcccccgatggcagtgtgtcagtcaatatgtaggtcactggcataccgctatcgggggcaagccccctcccacattggacagcatttcaagtcaggtctagaagaaacccagcgggttgatgtcgtagctcaccagcaggttcttggtctgttggtaatgatccaacatcatcttgtggttctcacgcccgacgcccgattttttgtacccgccaaacgccgcatgcgccgggtacaggtgataacagttggtccacacgcgaccggccttgatcgcccggcccatgcggtaggcgcggttgatgtcgcgggtccacaggccggcgcccaggccgaactcgctgtcattggcaatcgccaacgcttcggcttcgtccttgaaggtggtcacgcccaccaccggcccgaagatttcctcctggaacacacgcatcttgttgtggcccttgagcagggtcggctggatgtaatagccgctggacaggtcgccttcaaggcgctcggctgcgccgccggtgagcagcaccgcgccctcctcctgggcgatcttcaggtaggagaggatcttgtcgtattgctgctccgaggcctgggcgccgaccatggtctcggtgtccagcgggttgccgcgcttgatcttgacgatcttttttatcacttcggccatgaacggttcgtagatcgactcctgcaccaaagcccgcgacgggcaggtgcacacttcgccctggttgaagaacgccagcaccaggccttcggcggctttctcgatgaattgcggttcggcctgcatgatgtcttcgaagaagatgttcggcgacttgccgcccagctccacggtggacggaatgatgttctcggccgccgcatgcatgatgtgcgcgcccaccggggtggaaccggtaaaggcgatcttggcgatgcgcttgctggtggccagcgcctccccggcttcgcgaccaaagccctgcacgatgttcagcacgccgggcggcagcaggtcgccgatcagctcggcaaacaccatgatcgacagcggcgtctgctcggccggcttgagcacgacacagttaccggcggcgagtgccggcgcgagtttccacgcggccatcagcaatgggaagttccacgggatgatttgcccgaccacgcccaatggttcgtgaaaatgataagccgctgtgtgctcgttgatctcggcggcgccgccttcctgggcacggatacacccggcgaagtagcggaaatggtcggcggccaggggcacgtcggcgttgagggtttcgcgcacggccttgccgttgtcccaggtctcggccacggccagcacttcgaggtgttgctcgatacggtcggcgattttcagcagcaccagggcgcggtcctgggccgaggtcttgccccaggcatcggcggcggcgtgggcggcgtcgagggccttgtcgatatcggcggcgctggagcgcgggaactcggcgatgacgtcaccggtgaccggcgaggtgttggtgaagtactcaccgttgatcggcgcgacgaactcaccgccgatgtaattgccgtagcgcggcttgaagctgacgatggcgccgggggtgccaggttgggcgtagatcatggtgaggcctctgcttattgttgggtgttgatgggctgcatctgggtgcgttcgtagtgcgggtacaggtgggtcacgctgcgggtcagttcatagcggctctggttgatgcccgcgaatcgctcggggatcgggctgcggatcagctctggcatgtcgctgccatgggctgccccgtcgcgtagcaattgatcgagccaggtgaggtagtcacgcatctgttcgaagggtttggcgtcggtcgcaatggggccgtggccgggcacgatcagggtccagggcaagccttgcagggtggcgatgtccgccagccagatcgccagccccggtgaatggggcgtggtaagcgcacgttggtagaacaccaggtcgccggcaaacagcacgccggtcttgcggtcgaggatcgccaggtcggcgccggtgtgcccgcgcagttgcagcagttgcaggtcgtggctgccgaagtttttcacaccgggctgcagcgtttcgccgggcagtaccacttcggtgccgcgcatccagtcgccgaccatgcggtacaggttctcggccatgctgtcgccctgctcatgcagcaaatcctgggtaccggccagggcgccaatcggcacgtccttgaaggcttggttacccagcgcatggtcgggatggtggtgcgtcagcagcacctggatcaccggtttgtcggtgatgcgggcgatggcctggcgcagggcttcgccgtagcgcctggacggtccggtgtcgatcaccaccacgccgggctcggtgacgatgaacccgacattgacgatattgccgccgttgtccttggcgaaattgtcggtgctgccttccagcagccaggtgttgtcggcgatcaaacggggcttgagggcgtaatccagatccgccagcactggcaggctgaacagcagcagccacagcagaatccagcgcaggttcatgggatggccgcctcgaactggctaccgctggtgtcgcgcagggtcaggcgcgtggggccgccgccttcgatgtcgaaagccaggctggggttttcgctgaccgccgggaacagttccaggcgtgccagcagttggttatctgcgccgcgcagctcggcctggttgatgaagaattcggggatgccgctgaccatgccgttatccatcggatgggcgacttgcagtttcacgcggctgaactcggcgcgtgggtaacggccgccgagcacttcgcccaggtgttcttcccaacccggttgcgtgcgcaccacgctgggcgccgtgcagccaccgccagcagcatcgatcaaggccgagccgacatgccacatgccatctttggtgagcactgctgcacgcagcggcgtggcctgttcgatacgaatccgcagcgacagccacggcagcaccagcccctgcggctggaaatcgacgatctgcggcagcgggttcagctccgcccaggcgaggatcttgactacgtcgcccttgaacgcccgcgcatcgatctccagcggcacctggcgcgcatcctcggcgaacggcggcgccaagagcctcacgcgctcatcgaacacaaacgctgcattgtcgagaaagcgctggtgatagtaggcccacatcaccgagggcaccgggtccacgggcgcgccccaggccagcatcggcacacagcacaaccaccacccgcgcaggcccatggcttactcctcgacgtgcacgctgtcgaggtaggtacgcaccgcccacagggcttcctggctgaggtagtcggccattttcggcatgtacacccggccatcgcgcacggcgccgtggcgcacgcgctccacaaaccattcatcgccggcgtcgccggcatcgagcatgcgcaggtcgggagcgatgccaccggacttggcttccaggccatggcacgccgcgcagttctggttgtaggccgacgcaccgacctccaccgccttgtcatgctcgggtgtggtgcgataggggttggtggcggcccagccatcggcgtccagcggtacgccggcgtccttgatcggggtgaggcctttggtttccacggcggtgggcgtcacgttgccgtgggcccaggcggaacctgtactgattgcaccggcgagcaggcaggcggtcatcaaggcgttgcgttttgttgtcattatttttccctcgggagtgcacgcaaaacctcttggcagaggctatggcaaccatcttaggaagcacccggcaggacccgtatgctgctttggtgggcgggttctcatccgttggtagcaggccttgtggggcactgctaaatcagaggcggttcgggaaattgtcccggcaacaccgggactttttccgtattcgccacggcgttcacatcgcaccctgtgcaggccaaaacctccactgggaactgcaaccatgacaataagatcgctacccgccctctcgccgctgagccttgccgtgcaggccttcctgctggttggcagcctgtccttgagtgcggccagcttcgccgccgccgagcctgccaaacagacccgcaacgtcacctgggaagacatcgccaacgaccacctgaccacccaggacgtgctgcaatacggcatgggcaccaacgcccagcgctggagcccgctggcgcaggtcaacgacaagaacgtgttcaagctcacgccggcctggtcctattcgttcggcgatgagaagcagcgcggccaggaatcccaggccatcgtcagcgacggcgtggtatacgtcaccggctcctattcccgggtgttcgcccttgatgcgaagaccggcaaacgcctgtggacctacaaccaccgcctgcccgacaacattcgcccgtgctgcgacgtggtcaaccgcggcgcggctatcttcggcgacaagatctacttcggcaccctcgacgcgcgcctgatcgccctcgacaagaacaccggcaaagtggtgtggaacaagaaattcggcgaccacgccgccggctacaccatgaccggcgccccggtgctgatcaaagacaaggtgaccggcaaggtgctgctgatccacggcagctccggcgatgaattcggcgtggttggccagctgtatgcgcgcgacccggacaccggcgaagaggtgtggatgcgcccgttcgtggaaggccacatgggccgcctgaacggcaaggacagcaccccgaccggcgacgtcaaggcgccttcgtggccggatgacccgaccaccgaaaccggcaaagtcgaggcctggagccacggcggcggcgcgccttggcagagtgcgagcttcgatgccgagaccaacaccatcatcgttggcgccggcaaccccggcccgtggaacacctgggcgcgtacctccaaggacggcaacccccacgacttcgacagcctctacacctccggccaggtcggcgtcgacccaagcaccggcgaggtgaagtggttctaccagcacacgccgaacgatgcctgggacttctccggcaacaacgaactggtgctgttcgactacaaggacaaggatggcaaggtcatcaaggccaccggccacgccgaccgcaacggcttcttctatgtggtcgaccgcaacaacggcaagctgcagaacgccttcccgttcgtcgacaacatcacctgggccagccacatcgacctgaagaccggccgccccgtggaaaacgaaggccagcgtccagccaagccattgccgggcgaaaccaagggcaagccggtggaagtctcgccgccgttcctgggtggcaagaactggaacccaatggcctacagccaggacaccgggctgttctacatcccgggcaaccagtggaaagaggagtactggaccgaagaggtcaactacaagaagggctcggcgtacctgggcatgggctttcgcatcaagcgtatgtatgacgaccacgtcggtaccctgcgggcgatgaacccgaccaccggcaaggtggtgtgggagcacaaggaacacctgccgttgtgggccggcgtactggcgaccaagggcaacctggtgttcaccggcaccggcgatggcttcttcaaggccttcgacgcgaagaccggcaaggagctgtggaaattccagaccggcagcggcatcgtctcgccgccgatcacctgggaacaggatggcgagcagtatatcggcgtgacagtcggctacggcggcgcggtgccgttgtggggcggcgacatggcggagctgaccaagccggtggcacagggtgggtcgttctgggtgttcaagatcccgagctgggacctgaaaaccgctcagaagtaacctcaccctatatgccggggtcatcctttgtggcgagcgggcttgtcccgcgttgggctgcgaagcggcccccggcttttctccagccccaacgagccgtcaggttttggggctgctgcgcagcccaacgcggggcaagcccgctcaccacagcaagcccgctcaccccaggatccccagaggtctcgcgatgaaatatctgccctttttaatcctgctatccctgcccttggctcacgccgacgagggcgacgacgcccccctggtcatcaacggctgtaccattgccgaacacagccaatgccccggcgcccacctcaagggcgccaacctgagcaatcaagacttaagcaaaatgaacctggccggcgccgacctgcgcgacgcagacctgcgccacgccaacctcgacctggccaacctggaaaaagcccagttgcaaggcgccaacctgacccgcgccagcctgcaacaagccaacatgcgcctggcggatttcaccggtgccacgctgatggccgtgcaaggctgggggctgtttgcccagggcgcacaatttgaaaacgccaacctcagcgccgcctacctgcaatttgcccggttgtcgggggcgaagctgcaccaggccaacctgcgggcggccgacctggaaatgacctggctgagcaaggccgacctacaaggcgccgacctcagcgacgccaacctgcaagaagccaagttcggcgaaagcaacctggagaaagccaccctcaccggcagccgccagcactatgcgaatttccaggatgcgaacatggaaggttgcaaggactgcccgaccacctgggaccgttaacccgccacccgcaccacccccatgtcgatacccaaatgcaccaactcggcatgggaactcacctgcaacttactcttgagcaaggtcaggtgattggacacggtcttgctgctgatactcaactgagcggcaatcgcgcgcgccggggtgcccttggcgagcatcaggaaaatctccagctcacgctgggtcatgctttgcaggcgccggtcggtggggtggtacgccagctgggtggccaggtcctgttcgatataggtgtggccgtcaagaatgcgctccaccgcatccagcatcaccgccggcaacgcgcttttggtcaggtagccggacgcaccggcctccaacgcctggcgcaccaagggcaactcagcatgctggctgaaaaacagcacgcgcaattgcggcaagcgctggcgcaggcggcgggtggtttccaggccgctgatccccggcaggccgaagccgatgatcaccaggtttggcaccgcttcgtgcacccgcgccaaggcatcctcgccactcgccgcttcgcgcaccaccacaccgggcagcccgctgcgcaatagcccggcgtaacccaggcggaccacggcgtgatcatcgaccagcaggatattcatagtgcctccaatggcggtgcctctggccatgctagaaccccggggaccaatgggacctactactttggtactggttttgctgtctatcgtcgcattcccaaggcagcaggactggcgtgtaatgggcgcataacgataaggattggatccgccatgctgcccgctcgactgccccttgcggcactgttgtgcctgttcatcacgtacgtacaggccgacacgccactgttttccgccgatggctaccgcaccagcctgtaccgcagccccacgcccgaacacctgcctggggcgatcatcgtcgacaccccagccctgcaaaccctgttgacccagacgcccgcaccggtactgatcgacgtgtaccgccgcccgtggctacagggccgcttcatcgaagaccagccccacgccaacctgcccggcagtcactggctggccaataccggcgacggcgacctcacgcccgagtggcaaggttactttgtgcgccacctgtacaagtacacgggcggcaacctggcccgcccgctggtgttctactgccgcgccgattgctggctgagttggaacgcggtaaaacgggccgccaacctgggctataccactgtgtattggtaccgcgatggtttggatgcatgggaagcggcagacctgccagtaatggctgcgacacccgaaccctttgaataaaaaaccacaacaagaaggtgaacggccatgtacaaaattctgattgccgacgatcacccgctgtttcgcgaggcgatccacaacgttatcagcgacggtttccccggcagcgacgtgatggagaccgccgacctggacagcgcccttgcgctgacccaggaacatgacgacctcgacctgatcctgctggacctgaacatgcccggcatgcacggcctcaacggcctgatcaacctgcgcaacgagtcgccgaccattccggtggtgatcgtctcggccgagcaggacaaacagatcgtgctgcaagctatcacctacggcgcggtgggctttatcaccaagtcatcaccgcgcctgcaaatgaccgaggcgatccagcagattctcaacggcaatgtgtacctgccgccggacatcatccgcacccagaaaaacactgggcagcggcgcatgaacgacagccctgggtttgcccccgagctgttgcaggcgctgacacgcaagcagctgctggtgttggagcggatgaccaagggtgagtcgaacaagcagatcgcctatacgctggagattgccgagaccacggtgaaggcccatgtgtcggcgattttgcgcaagttgaatgtgcataaccgcgtgcaggcgatactcagtgccggagatatcgatttcggctcgtacctgcgccgctgacggtctgacacaccacaaatcaactgtgggaggggcggtgcgacgactcgacttgcccccgatggcagagtgtcagtcggcacatgcattgactgatccaccgctatcgggggcaagccccctcccacagttgatctgcatttggtcaggtccggctgagcaggtggctcatggcggttttcagcttcatgggcctgacgggcttgtgcatcaaggtatgccccaactcacgtatctgctgcttcaattctcggctcgtacctgcgtcgctgaccctttgacacaccacaaatcaactgtgggagggggcaagtcccctcccacagttgatctgcattttgtcagggccggctgagcaggtggctcatggcggttttcagcttcatgggcctgacgggcttgtgcatcaaggtatgccccaactcacggatctgctgcttcaattcattgctgtagttggcggtgatcatcaacgccggcaccgcgctcccgcgccgggcgttaatgcgggccacggcgtccacgccgttctggtcgtcgtccagatggtaatcggcaangcttcaattctcggctcgtacctgcgtcgctgaccctttgacacaccacaaatcaactgtgggagggggcttgcccccgatggcagagtgtcagtcagcacatgcattgactgatccaccgctatcgggggcaagccccctcccacattttgatctgcattttgtcagggccggctgagcaggtggctcatggcggttttcagcttcatgggcctgacgggcttgtgcatcaaggtatgccccaactcacggatctgctgcttcaattcattgctgtagttggcggtgatcatcaacgccggcaccgcgctcccgcgccgggcgttaatgcgggccacggcgtccacgccgttctggtcgtcgtccagatggtaatcggcaatcaacaggtccgcctcggcatggtagttgtccacctgccgcgccaggtcctgttccgacagcgccgtgatcacccggcagccccagccttcgagcaaggtacgcatacccgcgcagatcgccgcgtcgttatccagcacccacacccgggcaccttgcaggcgctcgagcaacggctcgctcatggaaggcgccggcagcgacttgggggccgtggcgctcaacggtacctccaccgagaacatcgagcctttgcccggccaggatctgacgctgatgcgatggccgagtatcccggcgatcttttccacgatggccaggcccaggcccaggccgcggtcctggtccggtcgctgcacgtcgccgcgcttgaactcctggaaaatttcctccaagcgctcttgcgcaatccccatgccgctgtcccacacctggatcaacaggcgctgctgctgacgccggcaacccagcaccacccgcccctggtaggtgtagcgaatggcattgctgagcaggttgcgcaggatccgcgccagcaactggatgtcgctgcgcaccaacgcggagcagccgacaaagtgcagcgccaagccttcggcgcgggccagttgggtgtactcggcggcgaggttgtcgagcaattcactcaaggcgaacggcgcgatatcggccttgatcacgccagcatccagtttggaaatatccaccagggtccccagcaggttttccacgtcttccagggagttgctcacattgcgcaccagggcttcgctggggcgttccagcaaggcactggtgaacagccgcgccgcattcaacggttgcaacaggtcatggctgacggcggcgagaaacttggttttcgacaggttggcctgctcggcctcgagcttggcttcgcgcaggcgggtttccatgcgccggcgctcgtcgatttccttgagcagttggtcattgagcgacgtaagctccgaggtgcgctgggccacgcgctgttccagatgctggtaggcctggtgcaaggcttcggccgtgcggcggcgttcggtgatatcgcggatcaacacgaagatccccaccacctcgccactggccagcatgttcggtacataggagcgcagcatgtagcgttcctggtggttgatgttggtttcggcgaactcaaaggtcacgctctcccccgccaaggcacgggcgacgtaggcatccaggcgctggcaatgctgctcgctgtgcacttcgcgcaggctctgcccaagcatcatgccgcgcggccagcagtaccattcttcatagaccttgttggtgaactcatagaccaggtcggcattcaagtagccgatcagcgccggcacgttgtcggtgatcaggcggatccagcgctcgctctcctgggctttctgcgccgccgcctgttcgccacgcagggtttcggcgcgcagccgggcgttgatcagcaggtggttgctggccttgagttcggccatcgcctggttcagcgcgtcggtgcgctcgcgcacttgctcggccagcaccaccgaatgctggaaggtggtgtaggggttgttgccctggggcatgccggactcgatgcgctcgatcagcgccgcattgatccgcgccagcttgtggttgtcctgttgcagccgggccagttgagcgggcaggtcagcgccggcctcgggcaatggcgaccccggtgaaggtctggttgatgtgcatgccattgaactgttctccgtaggtattgaaacccatcacccgctggtcccgcaagtaaccgccgagctgttcgagggtgccgttgtcctccagctccaggcggcgcaaaaagcaatcgcagccgatggtcagcaacaggtcgccgaggcgcgcttgcaggccgtcgaacagagcctgcaggttcggcagcagcgggccgggcgtcatcaccgtcagcacgatgccgttttccaccgcgcagtagaaactcaggctgaggtcctcatgcacctgctggatagcgcgcacgtagtactggtcgtggatacgcaccgccagcgggtgggcggcgaacgtgcggtggtcgaggtcggccaccgccacgccgatatgccgcgcgtactcttcggcggcgggctcggcgttgagctcgaacacgcggcgtgacgcgctgtcggcgccggtcaccaccagcttttccgtgcgcggcaggatatggtgggtggtgaacacctcgaaatccagccaggtgttgaccagcatcaccaccgccgcgccgctgtggaacacgccgttgaagtacacgtgggtgtgggtgaggaagttgtcgtcaccggccgaaccgccgaaatgcgggatatccccaagagccgcgctaagggcggcgaggaccatttcttcgcggctggacaggccgtcaagcagggtcagcgcaaacgtgttgcccttgatcggcgccagggtgttgctgcgacagccgccgaccagacgttcgaccatgtcctgggcaccgatcaggctgaagtgctcgacctgatcgatcagctccgtggcgatggaaaagtgcgcatggttgaagcccaccgccgtgatgcagttgcgaccgtagccttggggcgtgatctcgccggcgctggtgcagccgaccacacgcaccttgccgaagcactgttgcagggcctggccaagggcctggaggtcgtaggacgcggaacagaaaaacagcacaaaacccaggtacgggtgcagcagttgctgggccaattcctcggcggcctgcccagcatcggtggcctgggacatggcgctgactacgccttcactgttgtgcatcgttgcctccccctctgaagcatcagtgtacgaagggcctgggcgtggacctatgctacttgggtactgggtggggggattcgatgggatgggatgaggctttcaagaccactctctcaaaagccaatggagatccaatgtgggagggggcttgcccccgattgcagggtgtcagtcgatgcatgagtgattgatccaccgctatcgggggcaagccccctcccacattttgattgcatttcagatggctaccatgccattgccgtcgtccttggtcttgccgtaggacagggccaggcggttcttgccgaccttgtacgagccttgtaccaggtagccattgctgtcgacgttgcgcaacgtggcctccccggcattgttagtgaaaaacgggttgatgcccttggcctggaaccccgaaccggtcagcggcaaaccgcccatcttcgcctgcacgccgtagcccaggcccttggaggtgacggaggccacggtggaaaggcgttgatgtagccatcggtggagaaggtggtttcgtccttgtcgtacaacatgatttcggcgtcggcgaatgggctgaagcccaggccgaggataaaggcaggcaacagacgcagcggggacttgatgtcggaggcgattatcaaaaggcggtgggccatggcatacgctgccttggccctgatttgcggatgctttggaggggcagcgggtgcccggcaagttcggtttagtccaggcccggcacttaggatgtaagaccggccttgaccaacatgcccacggccaccacgacacacaggccggcaaaaccgacctgcaaggcacgcgcggggatcaccgaacacagacgccgaccggcgagcatgccgacgatactcgcggcgataaacacccaacccaccggctcgatgcgcacaccggcatgcagcgcgccggccacgccgatcaacgacagcaggctgatcaccatcagggaggtggcaacgatgccacgcatctgcacgtcggtgagctgcttgaacgctggcacgatcaggaagccgccgcccacacccagcaggccggacaccgcgccggtcaccgcgccgagggcggccagggtcgcgctgcatttggcggtccaggccaggcgcccggtctgctggtcgagcatgcagttcttctggccccaggaggcggtcccgtgatcactcggcccggcctcgcgtttttcgcgctgcaacatgcgccaggccaccagcaccatcaatgcactgaacagccccatcaacagggcttccggcaactggtgggcgaggtacacccccaccggcgaaaacagcgcgccgagcaaggcgatcagcaacgcggcgcgataacgcaccaggccatggcgcaaaccatcgaccgcccctaccgccgccgccgcgccgacggcgagcaacgacaccggcgcggcctgggtcatgctcaagcccaggcccagcaccagcgccggcaccccgaggatgccgccaccggcgccggtcaggcccatgaccaggcccatcaacaatcccaacacactggcgagcagcattcagtccaccttgctcaggcgggtcagccattcgcggcccttgagcatgccgttccagtagaaccacggcagcagagtcgccttgaggaaccacatcgagcgacgcgcctgggtcgggtccaggggaaaggtcggcagcagcttgccgccatagccgaactcggccagcaccaccttacccttctccaccgtcagcgggcaggagccgtagccgtcgtatttgagcggcaacggcgcctgtttgcgcagggccagcaggttctcggcaaccaccacgatttgcttgcgcaccgctgcggcggtcttggcgttggtggtgccgcacacgtcgcccaggccgaagatatgcgggtaacgcaggtgctgcaggctatgggggttcacttcgcaccagccggccgcgtcggccagtgggctttggcggatgaaatccggcgacacttggggtgggaccacgtgcaagaggtcgaaggctttctcttcgatgcggacgttgccctcggtgtccttcacttcgaaccaggccttgcgggctgggccgtcgactttcaccaggttggcattgaatgccaggcgggcgttgtacttttccacgtacttcatcagcggcggcacaaaggtcgccaccccgaacagcgcggcgccggccaggttgaattcgacgtcgatgtgtttcagcgtgccctgtttgagccagtgatcgcaggacaggtacatggctttttgcggcgcacccgcgcatttgatcggcatcgccggctgggtgaagatcgccttgccgcccttgagttgctgcaccaactgccaggtgtaagcagcgtgctggtaactgtagttggacgtgacgccatgtttgcccagggtgtcttgcagcccctcgaccttctcccaggccaggcgcaggccggggcagacgatcaggttgttccaggtgacgcgctggccgctgtcgagcaccagggtctgctcgtccggcagcagttcgctgacggcggcctgtacccaggtgacaccattgggcaacacgtcggccagtgggcggcgggtctttttcacgtcgtaggcaccgccgcccaccagggtccaggcgggctggtagcagtggtggtcgctcggttcgatcagggtgatatgcaggtgggggtcgcgcttgagcaggctggccagcaggccaatgcccgccgagccgccgccgatgactacgatatcgccactgatggtagggccccagtgttggtcggtcatggtctatcgcctttgtaatacatgcacacaagggtcgctgccggatggcgtcacgcccagctttttatgaccgcgccgcaatacaggccggacagggtcttcatcacttgaatcacttcatggctggccagcccgtagaaaatgtatttgccttcccgacgagtggccaccaacccctcgtcgcgcaggatgcccaactgttgtgacagcgtgggttggcgcacaccggtcagggcttccagctcgccgacattgcgctcgccctgggtcaactggcacaggatcagcaagcggtcctcattggccagggccttgagcaaggaacaggccttggacgccgatgcgcgcaactgggcaacttcgccttcactcagagtagattccatttgcctcgggtcctttgtgtcacttaagctcaaaacattatgtgaaaacgtaaactgattgtaaccacttttttcttcatcggggacgtccgccatgccagcgttgattcaagcctttctggacgaggcatcgtcgacctacacctacgtcgtctatgaaaccgacggcggcccgtgcgccattgtcgactcagtactcaactacgacccggcctcggggcgtaccgataccgcccaggccgataacgtgatcgcctttgtgcgcgagcacgctttgcaggtgcagtggctgctggaaacccacgcccacgccgaccacctgtccgccgcgccctacctgcgccgtaccctgggcggcaagatcgcgattggccagtccatcagtaaagtccagggcgtgttcaagcacctgttcaacctggagccggagttccgtgtggatggctcgcagttcgaccacctgtttgcaccgaatgaggtgtttcatatcggtaacctcaaggcccaggcactgcatgtgccagggcatacgccggcggacatggcctacctgatcgacggccgattgatcctggtgggcgacacgctgttcatgccggatgtcggtaccgcccgctgtgatttcccgggaggggatgcacggcagttgtatgcatcgatgcgcaagttgctggcctttccagtggaaaccgagttgtacgtgtgccatgactacccgcccgaaggtcgcgaggccaaatgccggaccaccgtggccgagcagcgcgcaggcaatatccatgtgcatgacggcgtggatgaagcggcgtttgtagaaatgcgcaccaagcgcgacgccgggctgggcatgccgacgctgttgctgccggcgatccaggtgaatgtgcgggcgggcaacctgccccccgccgaagataacggtgtggtgtacctgaagattccgctcaaccagctctgaatcgcgcttactcgaagtacgacgacttggagggcgcaagccccgaccacaattcgtcgatatgcttgaagccccactcctcggcgctttcacggctgatgatcttgtccggttgctcagccaggttcaccaccgactgggaaatcggcaagcgtgaacgtgccgaaaagaacaccttgaccttgggcgtcagcagcgacgtagggctttgttcgacaaccacgccaatgcgcccgctttccaggcgcaccaaggcgccgaccgggtaaatacccacgcaacggacaaacgcctggaacacccgggcatcgaagtgtcccttccattcggccattttctggatcgcctccgcgggcccccacccatgtttgtaggggcgctccgaggtgatcgcatcatagacatcgcataccgcgcccatttgcgcgaacaggctgatctggtcctgcgccaggccaaggggatagccgctgccgtcgactttttcatggtgatgcaggcacacatccagcaccagggcgctgatctgcgggcatagccgcaacatctgcgcgccttccaccggatgctgacgtacggtgcagaactccgtctcggtcagcccggccggcttgctcaagatctgctcgggaatggccattttcccaacatcatgaaacagcccggccaacccggcttcctggaccaactccggcgacaggttcaattgccgcgccagcgcgatcatcaagccactgaccgcgacagaatgcatgtaagtgtattcattagcctttttcaggcgcaccaggctgagcaaggcatggggatggcgcagcatagagcgggagatgtcctccaccaggctggccacttgacgaacctccaccgcgcgccccatgcgcaggtcactgaacatactgatcacggcacgcttggcaaccgcacacaccttcacggcacgcgccacctccgctttcatctctgagggggctggcaccacaggacgcggtgtggcaggttgtttgacggtgaccggcgccgctggggccggttgtggttcgtcgcagccttttgcggtatcgatccagacccgctggacctgcgacgtcaacaaacgctgccggtcctcttcacggtccaacaaaaagctgctcttccagaacccatggccgatccatggcccgtccagtttgtgcaggtacatccccaggatcacctgggaacaagcaatgcacttcagcatgtatcatcccccccaaggcatgacctgcttggcgatcaactcactgcaaacttcgccacgatctgtttcaagtccacggcgagcctggacagttcctggctggccaccgatgtctgaccggcggccgacgaactctggatggacaggtcgcggatgctgatcaggttctggtcgacggaacgcgccacctgcgcctgttcttccgacgcggttgcaatcatcaggttacgctcattgatgtcggtaatggcttgggtgatctgggtgatcgccacgccggcttcatgggcaaccttcaacgagtccaccgcttcattgcgattgaggaccatggaggccaccgcttcgctcgaacagctctggattttcgcaatcatctgttcgatttcctgggtcgatgtttgcgtcctgtgggccagcgcccgcacttcatcggcgaccaccgcaaagcctcggccctgttctcccgccctcgccgcttcaatcgctgcgttcaacgcaagcagattggtctgctcggcgatggagcgaatcacctcgaccacccgggcgatgtcctgggcctgtttggccagcccttcaacttccaccccggtttgctgcaccgtggagctcaacttttcaatcgaagcgatggtttgcgtcacccgctccatccccacgcttgccgaacgctgggagtcctgcgtcgactgggacgcagacaccgcattccttgccacctcctcgaccgctgccgtcatctggttgaccgccgtggcggcctgatccgtctccaggctttggcgctcaatgccggcagtggactcccgggtgatcgcactcatctcctcggctgccgacgccaactgcccggacgcctccgagatatgctgcaacgtgcttttcaggttcatctgcatggtagcggtcgatttttgcagctcggtcagttcgtcattgccgctgatggtaatggccacacgcaaatcgccgtcggcaatcttgccggtcgacaccagcagctcccgcaccggattgataatgctgcgggtcagcaagcgggccaccaccacggcgatcaacaccgaactgaccatcaacacccatgtgaacaaccgcgccgcatcatgctcactggcggcggcttgcaccgcggtcttcgagccctgttcattgatcgcaatcaaatcgctgatggaggcctgcacttggcgagcaatggggccgttgacgtcgcgcaaatacaccgccatttgttccgcggaaaagctggaggcttgcgcgaggaattcatccatcttctggctgtagttttttatctcactcagtgcctggtcgtacttggtacgctcctcggggctcgataccagcgttccataatgctcggcaacttgcagcacttcggcgcgaaccgccttgagtttttccagggaggcagggtccttgtccgcgtattccatggcgtaacgccgcaggtccaggcgaagtttgtaaaacgtcgaatctatctggccggccaggcgaatactgggcagccaattgttttctatttcgaccgtcgatgaataaaccttatcgacttttatcagcgtcatcgcaccttgtattaacagcaggaaacacaccacaccgaagcacaatgtggtacgaaagttcaacttcaaggctctcatggacatctcggctcacccttccccttggccgtgctgtacacggccttacgggtacaactttgtttaaccgagtgtgaaaaaaacgtgactacttacgcatttttttatgaatagtggcaaataaacatgacgcagatcattgcttagctaaccatcataattaacggctgttgcgactctccgacattcataccattagtccatcccgtggtaacggcagcgctgttttatatcgaacttgtttaagtgcaaaactggaccggatattggcgacgcctggcaccttggtcaaaaaatccatcatgaaacgctccagcgactggatcgtcggcaccaatacccggataaggtagtccgggtcgccggccatcaggtagcactccatcacttccgggcggtccgcaatcgccccttcgaactgctgcaacgccagctcgttctgcttttccaggctcacgtggatgaacacattgacgtgcaaccccagcaggtcggcgtccagcagcgtgacctggtcgcgaatcaagcccagttcttccatcgccttgacccggttgaaacacggcgtgggcgacaggttgaccgagcgggccaggtcggcgttggtgatccgtgcattctcctgcagggcgttgagaatgccgatatcggtacggtccagtttgcgcatgagacaaaatcacctgtttattatgtttatgcagtttttttatccgcaaatgatcctgagcgcaacgaaacagagataaatattcttctacgccacgcctatgattgttgtaggacaagatttcccctacccggggactgactgtcagctagcgcgcccactacaagaaattcacaagatagagcgtagaaagccatgacccagcagtatgaaccactgcgcctgcacgtccctgaaccctcgggccgcccaggctgcaagaccgacttcacctacctgcgcctgaccgacgcaggcaccgtgcgcaaacccgccatcgacgtagaacccgccgacaccgccgacctggccaagggcctgatccgcgtgctcgacgaccagggccaggccctcggcccgtgggctgaaggcatcccggtggagatcctgcgcaaaggcatgcgcgccatgctcaagacgcggatcttcgacaaccgcatggtggtcgcccagcgtcagaaaaaaatgtcgttctacatgcagagccttggcgaagaagccatcggcagcgcccaggccctggccttgaacatcgacgacatgtgcttccccacctaccgccagcaaagcatcctgatggctcgcgaagtgccactggtggacctgatctgccagttgctgtccaacgagcgcgacccgctcaagggccgccagttgccgatcatgtattcggtcaaggacgccggcttcttcaccatatccggcaacctcgccacccaattcgtacaaggcgtgggctggggcatggcctcggcgatcaagggcgataccaagatcgcctccgcctggatcggtgacggcgccaccgccgaatccgacttccacaccgccctcaccttcgcccatgtgtaccgtgcgccagtgatcctcaacgtagtcaacaaccagtgggccatctccaccttccaggcgattgccggtggtgaagcaacgaccttcgccggacgcggcgtcggttgcggcatcgcctctctgcgcgtggacggcaacgacttcatcgcggtgtacgctgcttccgcctgggctgccgagcgtgcgcgccgcaacctcgggcccacgctgatcgagtgggtcacctaccgcgccggtccgcattccacatctgatgatccttccaaataccgccccgccgacgactggagccacttccccctgggcgacccgatcgcccgcctcaagcagcacctgatcaggattggccagtggtccgaagaggagcatgcggcggtcagtgcagaacttgaagccgaagtgattgccgcgcaaaaacaggccgaacagtacggcaccctggccggcggccagattccaagcgccgcgaccatgttcgaggacgtctataaagagatgccggagcacttgaagcgccagcgtcaagagttgggggtctgacatgaacgatcacaacaacagcattgaagtggaaaccgccatgaccaccaccaccatgaccatgatccaggccctgcgctcggccatggatgtgatgctcgaacgagacgacaacgtggtggtgttcggccaggacgtcggctatttcggcggcgtgttccgttgcaccgaaggcttgcagaccaagtacggcagctcgcgggtgtttgacgcgccgatctcggaaagcggcattatcggcgtggccgtgggcatgggcgcctatggcctgcgcccggttgccgaaatccagttcgccgactacgtctaccccgccaccgaccagatcatctcggaagctgcgcgcctgcggtatcgctcggccgggcagttcaccgcaccgctgaccatgcgtatgccctgcggcggtggcatctacggaggccagacccacagccagagcatcgaagcggtgttcacccaggtctgcggcctgcgcacggtgatgccgtccaacccctatgacgccaagggcctgctgatcgcctccatcgaaaacgatgacccggtgatattcctcgagcccaagcgcctgtacaacggcccgttcgacggccaccacgaccgcccggtaacgccgtggtcgaaacacccgcaagcccaggtgccggacggttactacaccgtgccgctggacgtggccgccatcgtgcgtccgggctcggccgtgaccgtgctgacctacggcaccacggtgtatgtgtcgcaagtcgccgccgaggaaaccggtatcgacgccgaagtcatcgacctgcgcagcctgtggccgctggacctggacaccatcgtcaaatcggtgaagaagaccggccgttgcgtggtggtacacgaagccacccgcacctgcggctttggtgccgagctggtgtcgctggtgcaagagcattgcttccaccacctggaagcgccgatcgaacgcgtcaccggatgggacaccccctacccgcacgcgcaggagtgggcgtatttcccagggccgtcccgcgtgggcgcggcgttgcaacgggtcatggaggtctgaatgggcacgcacgttatcaagatgccggacattggcgaaggcatcgcggaagttgaactgtcggtgtggcatgtgaaggtcggcgacatggtcgtcgaagaccaggtgctggcggatgtcatgaccgacaaggcgatggtggacattccctcgccggtgcacggcaaggtgctctccctcggcggcgagccgggtgaagtcatggccgtgggcagtattctgatcagcattgaagtggaaggcgcgggcaacgccaaggatgcgccgctcgtcaaagaggcgccgaaagtcgccccggtggtggaagccaagccggtgccggcggttgtcgagagcaaacccgcgccggttgtcgcggcgcaggcgcctgtggcacgtgccgccgacgaacgcccattggcctcccctgccgtgcgcaagcacgccctggacgccgggattcagctgcgtctggtgcagggctcgggcccggcgggccgaatcctccacgaagacctcgacgcctacttgcaacaaggcacagcgaaggcttcatccaccgccaacccctacgccgaacgcaacaccgaagaacagatccccgtgatcggcatgcgccgcaagatcgcccagcgcatgcaggacgccacccggcgtgccgcgcatttcagctacgtagaagaaatcgacgtcaccgctctcgatgagttgcgcgtgcacttgaatgaaaagcacggtgccacacgcggcaagctgaccctgctgccgttcatcgtgcgcgccatggtcgtggcgttgcgcgacttcccgcagatcaatgcgcgttacgacgacgaagcccaggtcatcacccgcctcggcgcggtgcatgtgggcgtcgccacccagagcgatgtcggcctgatggtgccggtggtgcgccacgccgaggcccgcagcctgtggggcaatgccgaggaaatcgcacgcctggccacggccgcgcgcaatggcaaggccagccgtgatgagctgtcgggttcgacgattaccttgaccagcctgggcgcgttgggcggcattgtcagcacgccggtgctgaacctgccggaagtggcgatcgtcggcgtcaatcgcattgtcgagcggccgatggtgatcaagggccagatcgtggtgcgcaagatgatgaacctctccagctccttcgatcaccgcgtggtcgatggcatggacgcggcgcaattcatccaggccattcgcggcctgctcgaacaacccgccagcctgttcctggagtaaggcatgacgcagacattgaataccaccctgctgattatcggtggcggccctggcggttatgtggcggcgatccgtgccggccaactgggtatcccgaccatcttggtggaaggccaggcgctgggcggtacttgcctgaatatcggctgcattccgtccaaggccctgatccatgtggccgagcagttccagcaaaccgtgcaccacagccagggttcacagctgggcatcgaagtggatgtgccgaccctggacatccgcaaaagcgtggaatggaaagacggcatcgtcgaccgcctgaccaccggcgtcgcggcgctgctgaaaaagcacaaggtgcaggtgatccacggctgggccaaggtggtagacggcaagaccgtcgacgtcggcgaccagcgcatccagtgcgaacacctgctgctggccaccggctcgaaaagcgtcaacctgccgatgctgccgattggcgggccgatcatctcctcgaccgaagcccttgcaccgaaaagcgtgcccaagcgcctgatcgtggtgggcggcggttacatcggtttggaactgggcatcgcttaccgcaagctcggcgccgacgtgagtgtggtcgaagcacaggatcgcatcctgccggcctatgatgccgagctgacgcagccggtgaacgaatctctcaggcaactgggcgtgaagctttacctcaagcacagtgttaccggttttgccgatggcagcctgcaagtgcgcgacccgaacggcgacaccttgtcgttggccactgatcaggtgctggttgccgtcggtcgcaaacccaacacccagggctggaacctcgaagcgctgaacctggatatgaacggcgcggcgatcaagatcgacaaccgctgccagaccagtatgcgcaacgtgtgggccatcggtgacctgagcggcgagccgatgctggcgcaccgggccatggcccagggcgagatggtcgccgaactgatcagcggcaagcaccgcgaattcaacccggcggccatcccggcggtgtgctttaccgacccggaactggtggtggtcggcaagacgcccgacgaagccaaggccgccggcctggactgcatcgtgtcgagcttcccgttcgcggccaatggtcgggccatgaccctggagtcgaaaaccggcttcgtgcgggtggtggcacgccgtgacaaccacctgatcgtcggctggcaagccgtgggggttggcgtctcggaactctccaccgcctttggcctgagcctggaaatgggttcgcgcctggaagacgtcgcgggcaccatccacgcccacccgaccctcggcgaagccgtacaggaagccgcgttgcgggcgttggggcacgcactgcatctgtaaaaccgcggtgaggccatcgggggcaagccccctcccacaggggaatgcattcaaattgtgggagggggcttgcccccgatagcggtggatcggtcaaaccagaggctgaaggcgtccacccagtggctcccacacaagccaagaatgcagtattgttgcgcccatccagaaaaaaaccgacttgaccaacgatagagggtgtcatgggtaacgaaagcatcaattgggacaagctgggttttgactacatcaagaccgacaagcggtttctccaggtctggaaaaacggcgaatggcaagaaggcaccctgaccgacgacaacgtgctgcacatcagcgagggctccaccgccctgcactatggccagcagtgcttcgaaggcctcaaggcctaccgctgcaaggacggttcgatcaacctgttccgcccggaccagaatgccgcccgcatgcagcgcagctgcgcacgcctgctgatgccgcacgtgtcgaccgaagacttcatcgatgcctgcaaacaagtggtcgcggccaacgagcgcttcatcccgccgtacggcagtggcggcgcgctgtacctgcgcccgttcgtgatcggcaccggtgacaacatcggcgtgcgcaccgcgccggagttcatcttctcggtgttctgcatcccggtcggcgcctacttcaagggcggcctggtgccccataacttccagatctccaccttcgaccgcgccgccccacagggcaccggtgccgccaaggtcggtggcaactacgccgccagcctgatgccgggttcggaagcgaagaaatccggtttcgccgacgcgatctacctggacccgatgacccactcgaaaatcgaggaagtcggttcggccaacttcttcgggatcacccacgacaataagttcatcacaccgaagtcgccttcggtgctgccaggcattacccgcctgtcgctgatcgaactggccaagacccgcctgggcctggacgtgatcgagggcgaagtgttcatcgataagctggaccagttcaaggaagccggcgcctgcggtacggcggcggtgatctcgccgatcggcggtatccagtacaacggcaagctgcacgtattccacagcgaaactgaagtcggcccgatcacccagaagctctataaagagctgaccggtgtgcagaccggcgacgttgaagcgccgcaaggctggatcgtcaaggtctgagccacctggaaaaacccgccatctggcgggttttttcattgttcggggatattcaccactagcttcttgcccatgctgatcctgggttccaccccataccccaatgcctcgtagaacccgacgaccccctcattaccactggtgatctgcaggttgatcttcatgcagcccagcgccgtcaatgcctgttccgcatgccgcaccagcgacgaacccaggccatggcgccggtagtccgcatgcaccgccactgaatacagccagccacggtgcccgtcatacccggccagaatcgtcccgatcacggtttttttgtccgtcgcgacgaagaacaaaccatcgttgaccgccagcttcttatcaatcgccagggcgggcaggttgtgcgccgtttcgtagccaaacgcctcttgccacaacgccactacctgcgcccggtgctgacggtcgcgatacggcccgatgggatgccgggacagcagggccttttccatcaccaacgtacgttcgctgccgtgataaacgtcgcgcacggtgtgaaaccccagcttggtgtagaacggctcggcggtcagcgaagacggcacgctcagcaccgtcaccccgtcttcgcgggcgcgtagctcgatttcgatcatcaacagccgaccaatgccctgcccttgcaactccggattgacgaacaccgagcgcaccacattcgcatccagcgctgcggtggcgacgatcacctgatcctgaatcgctaccagcaccacgcggcgcttgagcaacgccagcactgcctccggtgtgaagttgctggcgacccgcgcaatcacctccgtcggataatcccgcgcattgctgctgtgcagggccgcgaggatgacctggctgatcccttcggcatcggcttcctgggcgagacgaacggcggtagacatgattcctcctggctgacacagctgcaacaaacaccatcctaccaatgtgggagggggcttgcccccgatagcatgctttcagatatagattttctggctgacccaccgctgtcgcgggcaagccccctcccacaggttgcatgcatttcactccggcagccgattcggctgccctacccaacttttcagctttcccggctgaaccacccctcggtttcagccgggattcaccccgcacaacccacaaaatagccccacagctcaccccatggatttcgtgcccccatgcaaaccaccaacaccgtcttgatgattcgcccggcgcgctttgccttcaacccggacaccgcaatcaacaaccgtttccaacgccagcctctcgacccactccacgcacagcagaaagcgctggaagagttcgacggctatgtcgccaccctgcgcaatcacggcgtcgaagtgctggtggtgcaggacaccccggcgccccacacccctgactcgatcttccccaacaactggtggagcagccacgccgacggcagcctggtgctgtacccgatggaaggccagaaccgacgactggaacgcgacaaaggcgtgctgcaagtactggagcaacgttttgcgatcaacagcaccatcgacctcagccacctcgaacaacagaacatcttcctcgaaggcaccggcagcatggtgctcgaccgccagcaccgcatcagctacgcctgccactccgggcgcacccaccacgacgccctgcgtcagttcgccgagcgcctcgactaccagctttgcgtgttccacgcggtcgaccgccaccacgcgccgatctaccacagcaacgtgatgatgagcgtcggccgcaacctctcggtggtgtgcctgcaagccctgccgattgccaatgagcgccaggccctggagcgctccctgcgcgacaccggtaaggacatcgtcgccctcgacttcgaccagttggaagccttcgccggcaacatgctcgaagtccacgaccgcgacggccagccgctgctggtgatgtcggccagcgcctggggcgctctgcaaccggcgcagcgccaacatatcgagcgccacacccggccggtggtggtgaacatcgacaacatcgaacgcatcggcggcggcagtgcccgctgcatgctggcggaagtgcatctgcccgcccgtccctcatttcaataaggagtcttgccatgacccgctatatcgacgtcaacgacctctgctacctggtctcgcaaaaaggcctgtccacctgcatcaccgaaatggccgagtacatccgcgccgactacctgcgctggcaagatttcgaaaaatgcgcgcgcctggccaaccactcgccggacggcgtgatcgagctgatgccggtgtccgatgcgtcgctgtatgcgttcaagtacgtcaacggccacccgaaaaacaccctggcaggcatgctcaccgtaatggccttcggcgcgctgggcgatgtcgacaccggcctgccggtgctgctggcggaaatgaccctgaccaccgcgatccgtaccgccgccacctcggcgctggtcgcccgctacctggcccgcgagaacagccgcagcatggcgctgatcggcaacggttcgcagagcgaattccaggccctggccttccacgccatgcttggcatcaatgaaatccgcctgttcgatatcgacgccaaggccactgccaaactggccgccaacctcaaggccttcccggcgatcaaagtgatcctggccggcagcgtggctgaagcggtcaaaggcgccgacatcgtcaccaccgtcaccgccgacaaggcctacgcgacgatcctcaccgacgacatgatcgaacccggcatgcacctcaatgccgtcggcggtgactgcccaggcaagaccgagctggaccgacgtatcgtcgagcgcgcccgggtgatcgtcgagtacgaaccacaaagccgcatcgaaggcgaaatccagcacatgccggaagattcgccggtcacagagctgtggcaagtgatcaacggccagcagccaggccgcgagaatgcgcgccaggtcacgctgttcgactcggtgggttttgccattgaagactactcggccctgcgctacgtactcgacgtcgccaaggcgctggatgtgggcagcacacttgaactggtgccggacctagccgaccccaaagacctgttcgcacgcctggcccaacagccccgcgtacagcagaaaaagcgcgcctgagaccgctctggcctgctgctttgcgtcgagggcgggccattttttcagggaggaaaagccgattcagcgggtgtcacagccgattccgctgcattgccagttttaacagcgcaatttgcgctttatgcgaggggtaaacgacacaaaaaacgcaccatcatgaagcattctctgctcccagttattcactgccctgacatcaattacaaaatatagggacctgcacatgactccattgcgatcactcttcgccgcgctgctgttgccactctgcgccacctccgcccacgcccaggactggaaagaaatccgtttcggcgtgttccccgaatacccgcccttcgaatccgtggccgccgacggcagcctgcaaggtttcgatatcgagctgggcaacgcgatctgcgccaagctcgaagtgaaatgcacctgggtccacaatgaattcgacggcatgatcccggccctgcgcgcgcgcaagttcgacgcgatcatgtcgtccatggccgtcaccccggcccgtgaaaaaatcatcgacttcagtgaccggctgttcctcagcccgacctcggtgatcacccgcaagagcgccgacttcggcgacaccccggaatccctcaagggcaagcaagtcggcgtactgcaagggtcgttgcaggaggcctatgcccgtgcgcacctggccaagctcggcgcgcagatcaaggcgtaccagtcccaggaccagaactacgccgacctgcagaacggccgcctcgacgcgaccctgaccgacaagctcgaagcccagctcaacttcctgtccaagcccgaaggcgccgacttcaagaccggcccggccttcaaggacccgaccctgcccctggacatcgccatgggcctgcgcaagaacgaccaggaattgcgcgcgctgatcaacaagggcatcgctgcggtgcaggcggatggcacttacgcgcagatccagaagaaatactttggtgatcaggacatctaccacgagtgatgctctgacctcgctgtggaaacttgcttgtgtgggagggggcttgcccccgatagcggtggttcagtcaactgatttggcactgatacacctctatcgggggcaagccccctcccacaaaaggcagcgtccacagtcaatctctgtgctccatcgagatcatttccatgaatgaattcctcaacttgcaaggctacggcccgatgctcgcccagggtgcgtggatgacgctcaagctgtccttcctcgccctggccttgagcctcgccctcggcctgatcgccgccggcgccaagctctccagcgccaaatggctgcgggtgccggccacgctctacaccacgctgatccgcagcgtgccggacctggtgctgatcctgctgattttctacagcctgcaactgtggctcaacgacctgagcgaactgttcggctgggactactttgaaatcgacccgtttaccgcaggcgtcgtcacgctgggcttcatctacggtgcgtatttcaccgagaacttccggggcgcgatcctcagcgtgccggtcggccaactggaagcggcgaccgcctatgggcttagccgctggcagcgctttcacctggtgctgttcccgcagctgatgcgttttgccctgccgggcctgggcaataactggctggtgctgctcaagtccacggcgctagtgtcgatcatcggcctgtcggacctggtcaaggccgcgcagaacgccggcaagaccaccaacgagccgctgtacttcctgatcctcgcgggcctggtgtacctgatgatcaccaccctctccaaccgcatcttcaagcgcctcgaacggcgctacaacctcggcatcaaggggatggcgcgatgatcgaactgttccagcaatacggcctggcctacctgctcagcgatggcgcggggctgtccggcgtggccatgaccctgtggctgttcatcgtctcggtggtgttcggcttcgtgctgtcgattccgctggcgctggcgcgggtttccgagcacttctggctgcgctggccggtggaggtctacacctacctgttccgtgggacgccgctgtatatccagttgctgatctgctacaccgggctgtacagcctggaagtggtacaggacaacgccctgctcaaccagtttttccgcaacgcgctgaactgcaccctgctggccttcgtgctcaacacctgcgcctacaccgtggaaatcttcgccggggcgatccgcaatattccccacggcgaaatcgaagcggcccgcgcctatggcctgcatggctggcggttgaacctgtttgtggtagtgccggcagctctgcgtcgcgcattaccggcctacagcaatgaaatgatcctgatgctgcacgccacctccctggcgtttaccgctaccgtcgccgacatcctcaaggtggcccgcgacgccaatgccgagacgttcctgacgttccaggccttcggcatcgccgccctgctctacatgctgctgtcctttgcactggtgggcctgttccgactggccgaacgtcgctggatgcgttttcttgttcctacccgaggctaacccatgaatcagtccgcgcaggccctggccacttatcccgttgacgaacccgtagccaaacccgccaccgctgccatcaagctgcaagtcgaaggcatccacaaacgctacggcgaacacgaagtgctcaagggcgtatcgctgaatgcgcgcaatggcgatgtgatcagcctcattggcgccagcggctccggcaaaagcacgatgctgcgctgcatcaacttcctcgaacagccagacgccggggtgatcaccctggatggcatcagcctcgaaatgcagccaggccgcgccggcacccgcgcgccgcaccaggcccagttgcagaacctgcgcacacgcctggccatggtgttccagcacttcaacctgtggagccacatgaccgtgctggaaaacatcaccatggccccgcgacgggtgctgaacgtgagcgccgccgaggcggaaaaacgcgcgcgcctgtacctggacaaggtcggcctgccgggccgcgtggcggatcagtacccggcgttcctgtccggcggccagcagcagcgcgtggccatcgcccgagccttggcgatggaaccggagatcatcctgttcgatgaaccgacttccgcactcgacccagaacttgtaggagaagtcctcaaagtcatacagacgttggccgaggaaggtcgtaccatgctgatggtcacccacgaaatgggctttgcccgccaggtgtccagccaagtgctgttcttgcatcagggcaaggttgaggaacaaggcgatgccaggatcctcgaccaccccggcagtgagcgcctgcaacaatttctttccaaccgtttgaagtgaaccccatggataccaaggccaacggaccccattcctcccctgcgctggaccgcatcgatgaggccatcatcgaagtgctgcgccatcaggggcgcatcacctacgaaaaactctcgtcgctggtgcacctcacgcccaggccttgcctggaacgggtgcgcaagctggagcggcgtggggtgatccgtgggtatggggcgatcatcgatgtgcagatggtctcgccaggcttgtcattgctggtcctggtggccttgtccaaccaaagcgggcgctcggcgcaaaaggccttcgaagcctgtgtgaaagcctgcccgcaggtgttcgaatgccagctgatcagcgggccgttcgactacagcctgcgcatgcgttgccgggacatggagcactatcgagtgctgacagaaacctggttgaacaatgacgagctgcacatcgataagttggtggcgcatccggagttggcggtggtcaagaacaccgccaccgagctggcctgaacttatcgctccaaaacaccgcaaatctaatgtgggaggggcggtgcgacgattcgacttgcccccgatgagggagtgtcagttaaaaatgtatagactgacacactgctatcgggggcaagccccctcccacatattcaaccctgcccgcttaagatttttttgccaggcttggtgccgatcagcctggcctgcccatccttctgcttccccgtccgcgcctcgctgatcaaccccggtatcaacttgccctccggcaggttcttccagaaccggctgggcaagtgcccttccatcaccttggggttcaaccgcgccgggttgaagatgtggctgtaataggtcagccacatcgcattgtgggggtcctcgacattctgcgccaactgccgccacgcctcggggcattcacgctggtggatcaactgctcgccgtcgtagtagaccccatccagcggcgtggcgatcatccagcgatggcggcccatgcgcccgataaagtgctggctggctgatttcaggatgtcatgggctggctcgtgccaggccacgtattccggcagttccggccccgctcccgccggcagcgcgataaaccgcacaaacgcatgcaggtggtgcgcctcgcggctgacctgcttgatccgccgctgcaactcactgcccagcttgtccccggccagcatcgcggtgcggtcgccatggctgacgcgccataacacttcgtacaacaagctccaacgctggtcgccgtgatagcaggcagccgactccagcagttccaacaacgctttggggatccgcgcctggaacggccccaggccctcagggatcggctcatcggtggcaaacaggtccgccacctccgcctcgccccagctcacctggctggggtcgacctgatggctgagcagccagcgcgcctgatcgcgccaggtggcgaacaggttgtcgcattccaggctgatcacccccacaaccccatctgctgcggttgcgggcgatcacgcagttgttcgcgcagcaatacgctggtgctgtcggcctgttgcgggtggtagtcgctggtgatgaaaaacggcttggccttggccagtacgcagcgcatgcgcgccaggtcttcgaagcggatcttgcgttcgcggcgcaggtccaccaggcgctgggtggtgcgcaggccaatgcctggaatgcgtgcaatcaaggtcggttcggcgcggttcaggtccagggggaacacgtcgcgattgtccagggcccaggccagcttggggtcgatgtccagggccaggtggccagggcctttgaacagttcattggcattgaacccatagctgcgcaacaggaagtcggcctggtacaagcggtgctcgcgcatcagcggcggcgcggccagcggcacgcttttcgggctgttgggaatggggctgaacgccgagtaatacacgcgacgcagcttgaagttgccgtacaacgcctcggcaccgtggaggatggtgctgtcatctgtgtcgtcggcgccgacgatcagttgcgtgctctgcccggccggcgcaaaacgcggtgcacgcggttcgttgcgcacggtctgctcgccggtgtagatggtctgcatggcctgcttgatcgagacgatctttttttccggcgccagggtctgcaagctggcctcggtgggcagttcgatgttcacgctcagccggtcggcatagcgcccggcctcggcgatcagcgccgggtccgcgtcgggaatggtcttgaggtggatatagccgcgaaagtcgtgctcttcgcgcagcagcttggccacgcgcaccaactgctccatggtgtagtcggacgaacggatgatgccggagctgagaaacagcccgctgacgcaattgcgccggtagaaatccagggtcagagtgaccacctcctccgggctgaaacgcgcacggggcacgtcgctggagcggcggttgacgcagtactggcagtcgtagagacagaagttggtgagcagcaccttgagcaacgacacgcaacgcccgtcgggcgtgtagctgtggcagatgcccatgccatcggtggaacccagccccgccttgccctcggagctgcgcttgggcgcgccactgctggcgcacgatgcatcgtacttggcggcgtcggcgagaatgctgagtttttcgatcaactgcatggagggctaccgatactggttttttgtacagtatcagccaaccctccgggtcacaagtgcagcctgtcagcttgccgtggcgagcaacaggtcctgcaccgagcgccccttgccgcgcccacggtccagggcatacaacgacgctgcaatctcatcggcgcgaatcggcagcaccgacagcaaggtgtcgctcaagccatggctggcctggctgaaaccctggatgtagatgccggcgttgcagcgctcgtcggtgacgatgcggtagtcgcgtgccacttcgaagtcgcccaggtagtcttccaacggcgccagcaaggcgcggtgtgtctggcgctcgtagccggtggccaggatcaccgcgtcgtaatggttgacgctggtgtcgccgttggcgttgttgcgcagcgccagttcgatacccagcgggccgggggtggccttctcgaccacggtcatggtgcggaacgcctggcgggcgatgccggagactttctggcggtagaaaatgccgtagatgcgctcgatcaggtcgaggtccaccaccgaatagttggtgttctggtactcggccaccaggcgctcacgctcggcgccctcctgctggaacaccaggtcggtgaaggccggcgagaacacttcgttgacgaacgggctgtcatcggcgggcttgagcgccgagccgcgcaggatcatgtcgacctgcaccgacgggaagctgtcgttcaggtcgataaaggcttcggccgcactctggccgccgccgatgatggcgatgcgcatggccttgccgtcgacacacggctgggtggccatgcgctccaggtattgcgaatggtggaacacccggctgtcgcctttaagcgccttgaacgcctcgggaatacgtggcgtgccaccggcgctgaccaccaccgaacgggtggtgcgcacatgctgctcgcccagggcatcgcgggagatcacgcgcagcgcttcgacctgctgctgatgcaggatcggctcgatggccagcacctcctcgccgtagcgcgcctgggcctggaactgcccggcgacccagcgcaggtagtcgttgtactccatgcggcacgggtagaaggtgcccaggttgataaagtccaccaggcggtcgtgggctttcaggtagttgacgaaggagtacgggctggtggggttgcgcagggtcaccaggtccttgaggaacgagatctgcagctcgctctgggttaccagggtattgccgtgccagcggtagtcggcctgtttgtccaagaacagcacgtccagtttgccctgggccttttcgcgctcctgcagggcgatggccagcgccaggttcgaagggccgaaaccgataccgatcaggtcgtgaaccgcgggcgaagcaattgcctgtgtcattccagtgtcctctggataagccccttggcggtggggcgggaatacctttcaaggcctgaacaacaggccgtgtgttgataggaaacgaggacagtgaaataaaatttaaccgatcattgatcagtgtgcttcccactcgcgcatccgtacccggcagtgcttcatggcgttgacgatgtgtttttccaccagggcgcgggaaatgcacaggcgttcggcaatctgcaagtgggtcaggccgtcgagcttacgcagcaggaagctgtcgcggcaggccggcggcagttcggccagggcgcgttcaagcagctccaggcgctggccgtgggcgtgggtggtgtgcggcgaactgctggcaaagcgttcttcggcatcgagtacgtccagcggttcgacctggcgcaaggcgttgcgccgatggccgtcaatcaccaggttgagcgcagtacggtacaaaaaggcacggggttgctcgatgggggtgtcgctggaacgttccagcacccggacatacgcgtcatgcaccacatcctcggcgacctgacggttgcccagcttggcgttgaggaaacacaccagctcgcgatagtagttttccaacatgactcccggccgcggggtagcggcattaggtccccgggtgcaaaaaagacagcgttaaggtaatggcagtttgagtgcgtgcaatttatagtaattctcatctacttttaaagcagacttgcatcaacggacgatttttttcttcaagggagctgtaactgcttatgtaaccgcctaaatccccgcgcaattctctcgtttacttgtcagctccccgcaactgcggtccgaactttcctggctggaaacccacgcatgaaacgccctcgacctgcccgacgcgccttgctcgttatcgcgtgcctgatccccatcatcgccgtcgcggcctggcaggtgctgccgccggggcgtgacaccctcaccaccgtcaccgtcacccgcggcaatatcgaaaacagtgtgaccgccctgggcaccctgcaaccgcgccgttatgtggacgtgggcgcccaggcatccggccagatccgcaagatccacgtcgaggccggcgaccaggtgcaggaaggccagttgctggtggagatcgacccgtccacgcagaaggccaagctcgacgccagccgctacgccatcgagaacctcaaggcccagttgcaggagcaaaaggcccagcacgaactggcgcgccagaaataccagcgccagcagcgcctggtcgccggcaacgccacccgcgaggaagacgtgcaaaccgccaaggcggaactgagcgccacccaggcgcgggtcgacatgttccaggcgcagatcctgcaagcccaggccagcctgcgcagtgatgaagccgagctcggctacacgcggatttatgcgccgatgaccggcaccgtggtcgcggtggacgcccgcgtcggccagaccctcaacgcccagcagcagacgccgttgatcctgcggatcgccaaattgtcgccgatgaccgtgtgggcggaagtctcggaagccgatatcggccacgtcaaaccgggcatgaccgcctacttcaccaccctgagcggcggtaaccggcgctggaccagcaccgtgcggcagatcctgccgatcccgcccaagcctctgaatcagactcaaggcagcggcagccccaacagcacgaataaaagcggcagcggccgcgtggtgctgtacaccgtgttgctggatgtggacaacggcgacaacgcgttgatggccgaaatgaccacccaggtatttttcgtcgccagccaggccaaggacacgctgacggcaccggtcgctgcgctgcagggcacgacgaacgccaaccagcagatcgcccgggtggtggccaagaatggccgcatcgaacagcgccaggtgcaggtcggcatcagcgaccgcctgcgcgtgcaagtgctcgacggcctgaacgaaggtgatcacctgctggtcggcccggccgacggcaacgggggttgaggtgaacacgcccctgatcgaactcaaggacatccgcaagtcctacggcggcggcgacagcccgcaggtcgacgtattgcgcggcatcgacctggcgatccatgccggggaattcgtcgccatcgtcggcgcttccggctccggcaagtccacgttgatgaacatcctcggttgcctcgaccgccccagcaccggcgactacctgttcgccggggaaaacgtcgcgcacctggacagcgacgaactcgcctggctgcgccgtgaagcctttggctttgtgttccagggctaccacctgatcccctcgggttcggcccaggaaaacgtcgagatgccggcgatctacgccggcatcagcgccgccgagcgccatgcccgcgccaacgccctgctcacccgcttgggcctggccgagcgcaccggcaaccgtccgcaccagctttccggcggccagcagcaacgggtgtccatcgcccgtgcgttgatgaacggcggccatatcatcctcgccgacgaacccaccggcgccctcgacagtcatagcggcgccgaggtcatgaccctgctcgacgaactcgccagccagggccacgtggtgatcctgatcacccacgaccgcgaagtggcggcgcgggccaaccgcatcatcgagattcgcgatggcctgatcatcagcgactcggccaatgacagcgacgcgaaacccgtggccaccagcggcgccctgcaagccgtggacctgcgccagcgcctggccgacggcgccgagcacaacggcgcctggaaagccgaactgatggacgcggtacaggccgcctggcgtgtgatgtggatcaaccgcttccgcaccgcgctgaccctgctgggcatcatcatcggcgtggcgtcggtggtggtgatgctggcagtgggcgaaggcagcaagcgccaggtcatggcgcagatgggcgcgttcggctccaacatcatctacctcagcggttcgtcgccgaatccgcgcacgccgctgggcatcgtgaccctcgatgacgtgcatgcactggcgtccctgccgcaggtgcagcgcatcatgccggtcaatggcaacgaagccggggtgcgttttggcaatgtcgactacatggcctacgtgggcggcaatgacaccaacttcccggagattttcaattggccggtggtcgagggcaattacttcactgctgccgacgaacgtgcggctgccaccgtggcggtgattggacatcgcgtgcgcgagaagctgttcaagggtgaggtcgaccccatcggccagtacatcctgattgaaaatgtgccgttccaggtgattggcgtgctggcggaaaaaggcgccagctccggcaacaaggacagtgacgaccgggttgccatcccttacaccgccgccagcgtgcgtctgttcggcagctacgaccccgagtatgtggtgatcgcggcggcggatgcgcgcaaggtccgcgaggccgaagtggccatcgaccagttgatgcaaaagctgcacaacggcaagcgcgactatgagctgaccaacaacgccgcgatgatccaggccgaggcgcgcacgcagaacaccctgtcgctgatgctcggttcgattgccgcgatttccctgttggtgggcggcatcggcgtgatgaacatcatgttgatgacggtgcgcgaacgtacccgtgaaatcggtatccgcatggccacaggcgcacgccagcgcgacatcctgcgccagttcctcaccgaagcggtgatgctttcggtggttggcggcctgtgcggcatcgccctcgcactgttggtcggcggtgtgctggtgctggccaaggtggcggtgcagttttccctggtggcggtgttcggtgcattcggttgcgccctcgtcaccggcgtcgtattcggcttcatgccggcccgtaaagctgcccggctcgatccggttaaggcgttgaccagtgaataaacgatccctttacctgcccggcctctgcgtattgctcagcgcctgcaccggcaacccgccagccctggacagcggcatcgcaccgccggccgcctggcaatataccgagcgtgcggcggcgcaggccaccaaccggcaatggtggacacagttcggcagcccgcaactcgaccgcctggtcgatcaggctcgccgcgacagctacgacgtagctgccgccaccgcgcgcgtgcgtcaggcccaggccagtgcagtgatcgccggcgcaccgctgttgccggaggtgaagttcaacctcgccaccagccgtcaaaagttgctgcgcggaccgggcgggcccgatctggatgcgtcacgcaccaatgatgccgtcgacaactttggcgccaacctcaccgccagctacgaagtggacttctggggtggccgtgccgccgcccgtgacagtgcgctgcatagcctgcgcgccagcgagtttgaccaggccacggtggagctgaccttgctcagcagcgtggccgaccgttacgcgcaaaccctggctgcccaccagcgccagcagatcgccgaactcaacctggcgaacgcgcgcaacgtactcgacctggtgcagacccgctatgacgccggctccgccactgccctggaactggcccagcaaaaaagcctggtcgccagccagcaacgtcaactgccgcttatccagcaactggccgaagaatcgcgcatcaccctggccgccctcctcggccagcccgtgcaggccctggagctgggcagcgaaccgttccaggccctcacctggccgaccatcggcgccggcatgcccagccagttgctcagccgtagacccgacatcgccaaggccgaggcgcaactggcggcggcgcaagccgacgtcaccgtggcgcgcgcggccatgctaccagccgtcacccttggtgcgacgcttggctccgacgcttacaaggccgcagacattctgcgcagcccctactacacgctgaccgccggcctggtcggcccgatcttcaacaacggccgtttaagcgctgaacgcgacaaggcccgcgcccgtcaggatgaactgctgcaaacctatcgcggcgcgatcatcaacggctttgccgatgtggaaaaagccctcagcagcatcacccgcctcgaccagcagcgccaatggcagcgtgaagaactgcaacaggcgcagacggcgttccagatcgccgaaagccgctaccaggccggcgccgaagacctgctcaccgtgctggaaacccagcgcacgctgtacgcggcccaggaccagaatgtgcaactgcgcttgtcacgcctacaggccagtatcgccctgtacaaagcgctgggtggtggctggcagacagagatccgataaacaaaactccagtttcatacacaagacgttctttcagcctacattcttcgacccaaggtccttggtaaaaaaaccgctatcacacggttgcccgggacctctcgatgactgctgcaaaacacctgacgtgcgcctgtctctggctgctggcaaaccttgccgcagcccagccgttgatcccccccactgccatcgactggttgctggactgtcccctgcccaccgttgaacgcctggaccccgcggtactggaacgtacccaatgcggcaccgtgagcgtaccgcgcaattacgcagcgccccgccagggcaggctgcgcctgtacgtgactcgcgtcggtgcccgcgacccgctgagccgtgaaggcgtgatcattgcccaggccggcgacgcggccaaaaagaatcaggtcggcacctttgtcatccacctggccagcctgtggaacgcccactcccacccggcctatcgcaggctggtggaccgttatgacgtcatcgagctcagcacccgcgacctgagtaccgacaatggcatcgaaatggccgcccaggacctggagttcgtacgtacccaactcggtgaagctcagttgcgttacctgggcaatgccgacagcgcacgcctgggcaaccgctacgccacgctgttccccgagcgggtcacgcgcatggtgctggtcaacgcgcacgcgagcgaaatggcggcgcccttcgtcgaacaattgcgcctgaacgactcggccacacaggacgccagccgttgcatcaaccgctgggtgggcgacttcctggtctacggcaagcaacctccacgctccacgcgctgcctggattccgccgacaggcagtaaccccccgtttgcgacctgttggcctcaaaaacgacacccggcgttgacgctggggggcgatcgttattaagtgctatttatccgcattaatacgataaatcgaacccatgctaagccgcccgctacgacgcaaacgccagaagctgtccgatgtgattgtcgagtcggtcaagcgctccatcgtcaccgacgccttgaagcccggcgaccgcctgcccaccgagcgtgagctgatggaaagcttccagtgctccaagggctctgcccgcgaagcactcaaggccctggaagtggaaggcctggtgagcacccgcaccggccccagcggtggcgcctacctgaaccaggccggcaccgaaccggccagccgtgcactgcgcaactacctgcacttccagcacctggacggcgagcaggtgtaccaactgcgcaaagtcatcgaagtggaactggcggtgtcggtgctggggcgcctcagcgaagacgattatcaagccctgcaagacaacgtggatttctgcagcgccccggaagacagcgaagccggccagcgcgagcaacgcctggcggaactggagttccataacctgctggccaaggcctgccccaacccgctgctgagtttcatggcgcagtttctcaacgacctgctgcgcgacctggtggtgctgaaaaaagcctacaagcccaagcgcaagcagttcgacgcggccaacctggattatcacaagcagttgctgatcgcctttcgtgccggggatgaacgtgcggtacgcagcttgatgcatgaacacatgtgcgatgccgaacaccacatgaccgcccttgaaggccaggtcagcccgcattttctactggagttcgatcactcttaaggaacaccacagaccccatgtgggagggggcttgcccccgatgacgccagcacactcaatattcatgtcgactgacacaccgccatcggaggcaagccacctcccacagttgggctgcatttcaaccacacaccgtttcatccaataacaggcctgcccacaggcccttgctccaccgtatcgccattgccactcctgccaataactaaaccagggagtcaccccatgcagcgtcgtacgttgttgaaagccagtctcaccgcagccgccgccctcagcctcccgctgagcgtgcgttcggcatttgccgccgagccctttaccttttacggcctcaagtccatgtctggcgcgtttgccagctatggcaagtttgccgacatgggttcgcgcctggcggtggaacagcaccccgaggtgctcggtcgcccgttgaactacaaagtcatcgacaccgaaggcaacgccggcaaggcggtgcgcaaggtccaggaagccatccagcaggatggcgcgctgttcttccaggggtgcaccttgtcgtcgtcggcactggcggtggccaaggaagtcgacaaggtcggtggcgtgttcatgaccccggtgggcgccgatgaagtcaccggcaaggactgcaacaaggcgacgttccgctggtcggtgcccacctacggcgcgatccgcgaaaccctggtgccgttgatcaaactgctgcccgaagccaagcgctggtacaccatcaccccgcaatacgtgttcggcgaagccctgcttgaaggcgccaaaaacgtgctcaaggaacacggcctggagcatgtcggcaacagctaccactcgctgcaggagcaggaattttccggctacctgaccaacgcgatctcgaccaaacccgacgtgctggtgctgctcaacttcggcagccagtcgtccaacaccctgcgccaggcggtgaatttcggcatcaaggagcgcatgaaagtgctactggtgtggtccgccggcctcgaccagttccaggaattgggcagcgacgtgctggaaggcgtgtacctcggcgcgcagtactggcaccaggtcgacaccccgctcaaccgtgaactggtcaagctcacccaggccaagtacggcatcaaccccacctacccgctggccgccgattacatcagcaccaaggtcatgctcgaaaccatcattgccaccggcagcttcgacgggccgaccgtggccaaggccatgcagggcctgagtttcgaagggccgaccggcaaggaatcgatccgcgccggtgaccaccaggtgatcaaggattactacctgctgatcggcaaggccagcaacgacatggccgacaaggatgacctggccaaagtgctcagcgccggccagtcgttcccgccggtggacgccacgggctgcacgctcggctgatccgctgaattttgtagcgcaaggccgcgcaagcggcgtcctgccgagggttcctgcatgcttaatctttacctgttccagatcctcaacggccttgggctggggatgatctacttcctcattgcggtcgggctgacgatcattttcggcctgctcaatttcgtcaacttcgcccacggcgcgttctttctgctgggtgcctacatctgctacaccgccgtgagcctcaccggcaacttctggctggcgctgctgatcgcgccactggtggtggctgcgttggcctgggtgatcgagcgcctgttgatccagcgcatctaccacttgccgcacatgttccagatcctggtgaccctgggcatcgcgctgatcatccaggaggccagcgtgatgatctggggcccggtgggcaagagcgtcgcggtgccggaactgctgcgcggcgtgctggtggtgggtgatttcgtctacccctactaccgcctgttcctcattgtgttttccgggctggtcggcctgggcctgtggctgctgctggaacgcacgcgcttcggcgccctggtgcgcgccggcagtgaaagcaccgaaaccgtgtcgctgctgggcaccaatattttccgcctgttctccatgaccttcgccctcggcgtggccctggccggcgtcgccggtgtgctgtttgcaccgttgcgcggcgcgcagccctttgtcggcccggagattctcggcgtggccttcgtggtggtggtgatcggcggcatgggctcgttcagcggtgcgctggtcggcggtttgctggtgggcgtagtgcaaagcctgatgaccacactctggccccagggtgcgagcctgatgatctacggcgcgatggccgtggtgattctggtgcgcccttacggcctgttcgggagagcctgacatgagcgagaaaaatcccctgccgtttgccaagacgcaatcgcgcgccatgttgctgtgggtgctggcggtactgatcggcctgccgttgatattgccctcagcaaccctggccaccgagatcctgatctttgccatggccgccctggcctgcaacctgttgctgggctacaccgggctgctgtcgtttggccaaggcattttcttcggcgccggcgcgtattgcgcggcgctgctgatgatccacctgcaactgggcctgttcactgcgttgctcggcgccgccatcgccggtggcttgctggccttgctggtgggcgccctggcgatccgccgtaccggcatctacttcgtgatgctgaccctggccttcagccagatggcgtattttgtcgcctacaccctcagcgactggaccggcggcgacaacggcctgctcagcgtgccgcgcccggaaatccgcctgggcgacaccgtgctgttgtccctggccgacgcccgcgcgttctacggttttgtcgcggtactgttcctgctgatcttcatcggtgcgcgccgggtgatcgcctcgccgttcggcagcacgctgatggcgatccgcgaaaacgaaacccgtgcctcggccatcggctacgacacgcggcacttcaagatcctggtgtttgtgctgtccggcgccgtcaccgggattgccggggcgctgtacgccatgctgctgcactttgtgccgctgtcgaacatcgacctggcgatgtccgagaacatcctgatcatgaccatcgtcggcggcaccggttcgctgttcggctcgctgctgggcgccggttccatcgtgctgctcggggattttctctccgacctgtggccgcgctggctgatgctgctgggggtgatcctgatcctggtggtgatcttcatgcgcggtggcttgtggggcggcctggcgtcgctgttcgagaaggtgcgcggcagccgcaagagcgtggttgtcgccaaggaggaagggctatgagcatcctgctggaaacccaggacctggaactggcctatggtgcgttccatgcggtgaatggcgtcaacctcaaggtcgaggccggcaccatccacaccatcatcggccccaacggcgccggcaagaccagcctgttccactgcctcaccggcgagcgccaggccaccgccggggcgatccatttcgacggccggaacctgatgcgcaaacccgcccacggccgtgtcggcctgggcatggcgcgctcgttccagctcaccagcctgttccagaacctcagcgtgcgcgagaacctgcgcctggccgcccaaggccgtgacggcgcacgcgccctcaacttctggcgccgcgtagacagccagcgcgaacacctggaaatggccgaccaggtgctggagcgcctgcaactcaccgcccgcgccgacaccctggccggcgagttgtcccacggccagcaacgggtgctggaggtgggcatgtcgatctgctccaagcccaaactattgatgctcgacgaacccacctcgggcatgggcatcgatgacatcccgatcatgacccaactgatcagcgaccttggccgcgaccacacggtgctgttgatcgaacacaacatgagcattgtcatgtccatcagccaacgcatcacggtgatgagccacggccagatcctggtggagggcacgccggaattcgtgcgcgccgatgaacgtgtgcgcaccgcgtaccttggggaggctgcctgatgctgatcgtcgagaatatccattcgtactacgacaagagccacgtactggaaggcgtgtcgctcaccgtcaaccccggcgaactggtgacactgctggggcgcaatggcgccggcaagaccaccaccctgcgcagtatcctcggcatcatctgcccgcgccaaggccagatccacttcaacggccaggcgctggtcgggcagaagatcttcgaaatcgcccgccagggtttggcattggtgccggagaaccgcgggattttccgcttgctcaccgtcgaggaaaacctgcgcatcgccgcccgcaagaccagccgctggcagcttgaagacgtctacgccatgttcccgcgcctcaaggagcggcgcaaaaacgccggccacgcgctgtctggcggcgagcaacagatgctcgccatcgcccgcgcgctgctcaacgaccccaagctgctgatcctcgatgaacccaccgagggcttggccccggtgatcgtcgacgaactggtgaagatcctgcgcaaggtcaaggacgacggcctgccggtgctgctggtggaacagaacctgatggtctgcgacaagctcgccgaccgccattacgtgctcgaacaaggccgcgtggtctacgaaggcagcgccgaagccttccgtgccgaccctacgatcaaaaaccgttatttggccctgagtgcctgaccggagactgctaatgaacagttttacgcaaccgctccagagcaacgccccgctgatcaaccgcgaccgcctgtggcaatcgctgatggatttggcccaactgggcgccacggtaaaaggcggcgtgtgccgcctggccctcaccgacctcgaccgccaggcccgcgacctgtttgtgcaatggtgcgaggcggccgggtgcagcgtcagcgttgacgccatcggcaatatctttgcgcgccgtgccgggcgcaaccctgccctgcctccggtgatgaccggcagccatatcgacacccaacccaccggcggcaagttcgacgggtgctacggggtgatggccgggctggaagtgatccgcaccctgaatgatttaaagattgaaacccaagcaccgcttgaagtggtggtgtggaccaacgaagaaggctcgcgctttccaccgtgcatgatgggctccggggtgtttgccggtaagttcgacttgcaggacacactcgacaaagtcgatgaccagggcctgtcggtgggcgccgaattgcagcgcatcggttacgccggctcccgcgccgtgctcggccacccggtgggcgcgtatttcgaggcgcatatcgaacagggcccggtgctcgaggaccaggccaccacgattggcgtggtcatggggtgcctgggccagaagtggttcgacctgaccttcaccggcgtcgaagcccacgccggcccgacgccgatgcacctgcgcaaggacgccctggtcggcgccgccgaggtggtcagcgcggtcaaccgcatcgcccatcaacagcagccccacgcctgcggcacggtgggttgcctgagcctgcacccaggctcgcgcaacgtgattcccggccaggtgcacatgaccatcgacctgcgccacctgcacgcggacacgctgcaagccatggtcgatgaagtgcgcggcgtgatcgaagccaccgcccagcgacacggcctgacctttgaactgacgcccaccgccgatttcccaccgctggacttcgccccgacctgcgtcaacgcggtgcgtgacggtgccgaggccctgggcttgagccatatggacatcgtcagtggtgccgggcacgacgcgatcttcgtcgccgaactcggcccggccgggatgatctttgtgccgtgcgaaggcggcatcagccataacgaaattgaaaacgccgcgccggacgacctggcggcgggctgcgcggtattgctgcgcgccatggtcaatgcggcacagggggaaacggcatgagtgagatcggccaactgacggcggtgcaactgctgcagcattttcgcgacaagaccttgtcgccggtggaggttaccgaagacgccttgctgcgtatcgaacgctacaacccggtggtgaacgcctattgccacgtcgacccggaaggcgcgctgagtgcggcgcgcgcctcggaacaacgttggctcgacggccgaccctgcggtgcgttggacggtgtgccggcgtcgatcaaagacctgacgctgacgatcggcatgccgacccgcaagggctcgcgcacctcatccgccgaagggccgtgggacgtcgacgcgcccttcacagcctttatgcgcaaggccggcgcggtgctgctgggcaagaccaccaccccggaattcggctggaaaggcgtgaccgacaacccgctgtacggcatcacccgcaacccctgggacacgcgcaccacggcgggcggctcgtccggcggcgcaggcgcagcggcggcgttgaacctcggcgtgttgcaccagggcagcgatgcgggcggttcgatccggattccctgtgcgtttaccggcaccttcggcatcaagccgaccttcggttatgtgccgcaatggccggccagctccatgacgattctgtcgcacctggggccgatgacccgcacggtggaagacagtgtgctgatgctgcagaccatcgcccaaccggacgcacgggatggcttgatcggtgctccacgcaccacaccatggctgacgccgggtacggatttgaaaggcttgcgcgtggcctacagcccgaccttcggttacgtcgatgtcgacccacaggtggccaaggtagttgccgaagcggttcgaggcctggaacaactgggcgcccatgtcgagcagatcgacccagggttcagcgacccgctggaggtgttcagcaccttatgggcagccggcgcagcgcgcctgaccggcgccatgagcgaggcacaaaaacagctgctggaccccggactgttaaggattgcaaaacggggcgaacagctgagcctggacgacttcagtgccgcccttgaagcccgcgccgcattggtagcgcgcatggccgcgttccatgagcattacgatgtactggtgtcgccgatgatgccgatcaccgcattcgaagccgggcacgacgtaccgcccggctccggcttgcaggcatggacacagtggacccccttcacctaccccttcaacctgacccagcaaccggcggcgtcggtgccgtgtaggttggcggcgaatggcttgccggtggggttgcatgtggtgggcgcgcggtttgccgatgagcaggtgttgcgggtgtgccaggtgtatgcaaaggcattcccgaccaagcacctgcaggccccaatcaccagaacaccgtaggaccccatgtgggagggggtacacgcagatggtcctggccctatctggctgaggacgaacactgcaactgtgggtacttttcgccagttctacctaaagaccttgggagcaagcctccttccacagtatcgggcgcattcctttacactgtcccccattcatccccgggggcttcatggacatcgaactggcacgcaccttcctcgaaatcacccgctgcggcagcctcgccgcagcggccgagaaactgcacgtcacccagaccgccatcaccgcacgggtcaagagcctggaaagccaattgggcagcacactgttcgtgcgcaaccgcgccggcgcccggctgaccgccgatggcgaggccttcgtggtgtacgccaaccagttgctgcagacctgggaggccgccaaacgcgacctgccgctgcccgatggctatcgcaacgtgctgcacatcggtggcgaagtcagcctgtgcaacccgctgatgctcggctgggcccaggccctgcgccagaacattcccggccacgccctgcgcaccgaaatccgcgaaggcgaatacctgctgcgccaactggagctgggtgtactggacgccgccctggtgttccagccgcagtactggccgggcttgcaggtggagcaggtgctggaggaaaaactgattctggtgcagctggtgagcaacccggcgccctatgtgtacatcgattggggacccggttttcgtcaacaacacgacgccgccctgcccgacaaggcccgcgccgcgctgagtttcaacctggggccgctggcgttgcagtacatccttgagaacggcggcgccggctatttccggacccgcgtggtgcagagctacctggacagcggcgtgatgcaacgcgtgcccaaggcgccggagttcagcttccccacctacctggtgtattcacgggcgcgagactcggcggtgttgcaacaggcgctggggttgctgcgcgaggtggtcaaggccgaaagcgactggtcgcaacgctgggacccgctgatttgaagcaacaatatccgccgcgcatgctagcctgcgggtgtttccttttgcagccttaccgatgaacaagaaaaagtccgtcaccatcagcgacatcgccaaacaggtcggcatgaccaccatcacggtgtcacgggcgctgagcaaacctgacctggtcaagccggccaccctggcacgcatcctcgaagtggcgcgggagctggactacgtgcccaacgccttcgcccgcggcctcaagcgcagtgaaagcctgatcatcggcgtgatcacggcgtcggtggacaacccgttctacagtgaaatgatcaaggcgatttcccgcgaggccaagcagcacggctacaccatcatgctggtggacaccgatgagctggaagaactggaaagcaaggccgtggacaccctgctgggctaccgcgtggcggggatcatcctgtcgccggtctcggatgagccgggctaccagcccgactacctcgaacgcctggccaacggcaagaccccggtggtgctgctcgaccgcacgatccacgacagcccgttcagccgtgtggtgctcgacaactaccacagcggcatccaggccgcgcactacctgctgcgccagacgcccgacctcaggcgcctgctggtgctgaccggccccgaacattcacgcatcaccgtggagcgcctcaagggcctgcgcgaagtgctggccgaacacccgcaggtgcaggtcgaagtgcaggccggcgactacacgctgatgccctcctacctgcataccctcgactacctggccgaacactcggcgccggacgcgatcatggggttcaaccagttgatcaccctcggcgcgctgcgcgcgttgcgcatgcacaacatcccccacgacagcctgaccatctgtggcatcgaccgcctgcccttcgccgatatcttcggcgtgcccatcgcctgcgtggcccatgatgcgtccctggccggcagcagcgcggtacgcctgctgctcgaccgcctcgaagacccgagcaagccgcgggacaaggtggtcatcgctggccagttggaaaacggctaacgactggtataaccgccgtcgatgggcaggctgacgccgctgatcatgctcgccgcgcggctcagcaggaacagcaccggcagggccacttccgcggtttgcgcaaaacgccccaaaggaatcgccgccagcgccgggtcacgcttggccggtgcggaccacgccatggtcgccatcggtgtgagcgtgaccgttgggttgacgctgttgacgcgaatgccgaagcggccccactcggcacattgcacgcgggtgatcgcatccagcgccgccttggaggcgcagtagccgaggtgatcgtccagcgccaccaacgaggcctggctggagacgttgacgatgctgccggcgatctgcgcttcgatcattttcgccgccacacggctggcgacctgcgcagcggcgcgggcattgacgttcatcacctggtcaaacgcctcggcgctgatggcagcggcaggttccaggcgcgagatgccggcgcagttgaccaggccgtgcagcggcggcaggtcttgcagggctttgtcgagggccgtgctgtcagcgatgtccaggcagaggctgtggcaaccgagttgggccagggcctgcgcgtcgcggccgagggcaaacacgtcggcgccgctggcgatcagttgcagggcgatttcacggccaatgccgctgctggcgccggtgacgaggatgcggtggtgggtgaagtcgaaggcggcgttcattcagttctcctgcaggctgtgcatgatcggtttcagggccggataaagcttcaggtattcgccgaatgcacggtcatacgcctcgacgttttgcgccttgggctcagcgcgcagctccagttgcacccagcccttgtccatcgccgcatcactcaccaaccccaccgtatgcgccgccagcaacgccgcgcccaacgccgcctcaacctcctgaacgatggtgtacaccgggtaccgcgtgacgtcggcgatgatctgcatccacaggtccgaatggctcgccccgcccaccacgatcaagcgcgggtccagggagtgcgcaccgcgcgtacccgcttcgatgttatgccgcaaggcaaaactcacgccttccagcacggcgcggtacaggtggatcctggtgtggtacaggttcaagccgacaaaactgccactggcgcggtcatcccacaccgggctgcgctcgcccatcaggtagggcaagaacaacaggccctcactgcctgccgggatgtgcatcgcccgctgttccagcagcaccaggctgtcctggccgctggccttggcctgttgctcttcggcctggcagaactgctcgcgaaaccagctcaccgaagccccggcggtgatcgcaccaccgaagatgtacaggtcacggtggccgttgtagacgtggggcatgctgaccaggccatggcgcgcatccacctgctggttgaggtaaccccagcacatgctggtgccgatcatcgccacgtggttgcccggttgtgtcacccccgccgccagcgtggccatggccgcatcgacgccacccgccaggatcggcgtgccggcctgcaggcccaggcgtgtcgcccaggcctcaagcaaaccaccgaccacctccccggaatgcaccaagcgctgcggcatcatggcctgcgggatacccagcgcatcgagcatctcggccgaccagccacgcgccttcacgtcgtagacgccaccgatgttgccggcactgctgtggtccaccgccaactcaccggtgaagcaccagttgatgtagctgttcggtggcagcaggtagcgggttttcgcccacacctcgggctggtgctgcttgagccagagcatcttggtgaaaccgtagtagctgtccaccgagttgccggtcacctcgaacaggcgctccaggtccacatgctcgcgcacccaggccacttgctcgccggcgcggcggtccatccagatcaggcacgggtgcagcggtgtgagctgcgcatccaccgcaatccccgagccgccatacaggctgctgatgcacagcgccttgacctggtctttcgccacagcggccttggccatgcactgcgccacgcaggcctcgacggcgtccagccagacctgcggccattgttcggcccagcgcactttcggggtatccacgcgatacccctggctgtgctgggcgatgatcgtgccgtgaccatccaccagcagcgccttggtgctctgggttccgatgtcgacccccatcacgtaattcatgttcaaaccaccggcttcaacagcaccttgatcgacttggtcgagttggccaactcaaaggcttcggcccagtcgtccagcgggaagtcatgggtgacgatgcctttggaggtgaccaggccgcgctcgaacaggtcgatggcgatcgggtagcaatacgggccgaggtgcgcgccgcgtacgtccagttccttgcggtcgccgatgatcgaccagtcgacgctggtctcggcgccgaacacgctgaactcgacaaaacgcccgagcttgcggatcaggtccaggccctgggtgacgccggccggtacgccagtggtttcgatgtagacgtcgcagccgtagttgtcggtgaggccgttgatgatctcgcgggcgttgtcgcgggccgggttgatcaccacgtcggcgccaaattgcttcgccagttccaggcgctcgtcgaccatgtcgatcaccaccagtttcttcggggtcttcaacgcggcgacctggaccatgcacaggccgagcgtgccggcgccggcgatcaccaccacgtcatcgagctggatatcgccacggttgacggtgtggatcgagcaggccatcggctccaccagcgccgagtcttccagcgacaccgactcgggaatcttgtgcacgatggcagtcttggggatgcgcatgtactgggccatgccgccttcggccacttcacgctggaagccgaagatgttgtgcacttcgcacatccagtacttgccggacttgcagaagcggcacttgccacagggcacgatctgctcggcgatcaccttgtcgccgaccgcgacttcaaagtgctcggcggcgccctcgccgacttccaccacataaccgaaaaactcgtgccccggcaccaccggcgccttgacccaggggttgtcgccgccccagaacatcgcagcgcccgagtggcacttgcagtcactggcgcagatgccgcaggcggcgatgcggatcaccagttcattggcgcgggcctggggtttaccgatgcgttccaggcggtagtctttggggccgtggcagacgacggcttgcatgtcggtgtgcttgtccatggtgtcgagtcctgtgcttgttaggagtttatttgtggcgctgacggctgatgaaaatcgccagcaaaatgatcgcgcccttgatcacgctctggacgtagggcgacacgccaagcatgttcaggccgttgttcagcacgccaagcagcatggcgccgagcaaggtgccgacgatcaccccgcgcccgccggcaatcgatgccccgccgagtaccacggcggcaatcgcatccagctcgaacgacacgccggcattcggctggccgctcatcaggcgtgaggtgagtaccagcccggcaatcgctgcggtcaggccgctgatgccatacaccagcagcttgaagcgcgcggcacgcacgccggagaggcgcaccgcttcttcattgccgccgatggcgtagatgtagcggccgatgcgcgtgtgttgcagcagcacataggcggcggcgtaggtgatcagcatgatcaggatcggcacttcgatgccgaacaggctctggcgaccgaagaagccgaaccactccggcagcccggaaatcgggtagccgtcggtgtacatcaggcccaggccacgggcgatgcccatggtcgccagggtcacgatgatcggcggcatgtgcaggtaggcgacgaacaggccattgccgatgccgaaggccacgccgatcaacatccccgcgccaatcgccaggcccggcggcaggcccgcgaccatcaacccggcggtgagcgtgccggacaacgccatcaccggccccaccgacagatcgatgccgccggtgagaatcacgcaggtcatgcccaccgcgatgatcgcgttgatcgacacctggcgggcgatgttcgacaggttgctggcggtgaggaaggtgtcgctggcgaggatcatcaccagggtcaccaccaccagccccacgaacggatagaacgccggcgagcgcaccagccgcgccaggttcaggcgcagccggctgctgtcgacggtgttaatggacgtattcacttgagccccctgttgcatggcgcatgacctcttgaggattgacggcggacgcttcgaggaccttgacgatggcgcccttgtgaaacacggcgacgcggtcgcacatgccgatgacttccggcagctcggaggaaatcatgatgattgcgtagccctgttcggtgaggctgcgcatcagcgcgtagatctgcgccttggcccccacgtcgatgccacgggtgggttcgtcgaacaccagcacgtcgcagtggtggttgatccagcgggcgatcaccaccttctgctggttgccgccactgaggttgaacacccggctttcgccgctgggggccttgatcgacagctggcgcatcaggtcttcgacactggcgcattccctggccttgtcgatcaggcccgaggcgttctggtatttgggcaggttgttcagcgagatgttttcacgaatgctgaaatcggtgatcagcccttcgctcttgcggctttccggcagcaggccgatgccgtgggcgagcgcctgggccgggtcatccagggtaattttctcaccgcgtagccacacgtctttgctcaccgacggcagcgcgcccatcatgcccagggccagctcggtgcgaccggaaccgaccagaccggcaaagccgaggatctcgcccttgtgcagttggaagctgttgcgggggccgttgcgcaccagctgaatgtccttgacctccagcaacagcgggccgcgctcggtgttcggtttgggcggaaaactgcattccaggcggcgcccgaccatcatctcgaccaggcggtcgatatcgctgtcggccacgtcggtgacgcccacattgccgccgtcgcgcaacacgctgatgcggtcacacacctggaaaatctcctccaggtgatgggagatgaaaatcaccgccacgccctggcgcttgagctcgcgcatgatctcgaacagcagttcggcctcgctgggggtcagcgtcgcggtgggttcatccagcaccaacaggcgcgcatccagggccagggccttggcgatttcgacaaactgctgctcggccacgctcaggtgcttgaccgcacattgcaggtcgatggtcacgccgaggcgcttgaacaacgcctcgctggccgcgaccatttcgcgcttgcgcagcaggccgaagcggttgctcagctcgtggccgaggaagatattttccaccgccgtgaggtagggaatcaggctgaattcctggaacacgatgccaatgccggcggcgattgcatcgcggtaggtcgcgaactgccgggcctggccatcgatcaggatctggccttcgtcctgatgctcgacgccaccgaggatcttcatcagggtcgatttgcccgcgccattttcgccgagcaaggcatggatctcgccgcgctcgacctgcaggttgatggacttgagggcctgtacgcccgggtaccgcttacagatgttttccagcttcagaagactgctcataccgccgacctcgtattcagaaggagaccgcaagccccacggatggcgtggggcctgggtgatttaccagctgaaatccttggccttggcctggtcgatcaaggtgatgtccaccgggatggtggccggcacttgcgagccccacttcttggccagggcgatgcccagggcaaggcggatctggtcacgagggtattgcgccgaggtggcgatgaatttgctgccgggtttctggatcgccttgatcgcttccggcgcgccgtcgacgctgaccagtttcacgtccaggccgctggcttcgatggccgagagtgcgccgagggagccgttgtcattcacgctgaaaatgcccttgagggtgggctgggcctgcagcatattttcggtgacggtcagcgcctggtcacgttcctgcttgccgttctggatgctgacaatcttgatgtccgggtgcttggccacggcttctttgcaaccacgcacacgctccaggatcggcaccacggcaatgccgtcgaggatcgcgatattgcctttgtcgccgatgctcttggccaggtattcacaggcctggaagccagcgtcgaagtttttcgaaccgacaaaggaatccagcgggccgtccgcctgggcatcgaccgcaaccaccaccacgccggcggcgtgggcagacttgacggccgattgcacgccgaccgagtcggtggggttgatcagcaggatatcgatgcctttttgcagcatgtcttcgacgtcactgacttgcttggacacgtcatgacgggcgtcggtgatgatcagtttcgcgccgatggtcgccccggcttcttccagggcgtttttcatggtgacgaaataggggttgttgatttcctggaaggacgcgccgatgcggatcggcttggcggcgtcggcaaaagcgggggcagcggtaccgagggtgatgcttacagccaataaacacagggttttcgggagcattttcatggcgtggttctctgttttgtttttattgttagagcaaatgttatcgttaacattttgcgagaagctaacaaggaaattcgggtgacgcaaggggccactggtcggcttcggtcggaatgtgggagggggcttgcccccgatggcggagtgtcagttggcgatgtaagtgactgacctgccaccatcgggggcaagccccctcccacacgtgttcatgtgtgcaccacaaaacctcgcacaatcttgagtaccaactaagctcagcctccaacaaaaaagaccgagctgcctgccatggcccatcccaccgagacctttcgcgcccgttaccgcgcccaagtcgcgccccactacaacccctggctccacgccagtttcgtgttcggctacggcatcgcgtgcatcagcctggcctggtcatcgacgcaccagatcaccgcgctgcaatggctgaccgtgcccgcgacgctggtgttcttcaacctgtgtatctacttggtacaccgccacctcggccaccacaaacacgccctggcccgcctgttctatgcgcgccacaccggcgatcaccacagttttttcacccccggccacatgacctacgacagccctagggactggcgcgtcattctgtttccggcctggctgatcgtgctgcacagcctggcgatcaccctgcccgcctggtggctgctccagcagttgagccccaacgtcgccggattgttcgccgggtgcatgctcctcggatatttgctttacgaattgtttcacgcctgcgaacacctgcccgccgaccacccagtggcacggctgccgtggctgcgccagatgcaccagttgcataccctgcaccaccgccgtgagctgatgcaggggcacaatttcaatatcgtcctcccgctgatggattacttgttcggcaccctgtactgggagccgggcccccacgacaaccaggaatcgtcatgagtacccgtcccaaaaaactgcgtcatctgttgtttgtgctgtttctgctggtgatcgccttcttgctgttgatgcccaccaaagtgcaaccggtgaactggacaccgcccaagccgccgtcgctgaaggacggcccctacgccgaaaaccagcgcctcaagggcgtgcagaagatcggcgcgcaggacatcgccgggcccgaagccttgctgctggatgcccagggttatctgatcagtggcttgcatgacgggcgcatcatccgcaccgcacccgacagccgcagcctggaggtactggccaataccggcggtcggcccctgggaatagcgctgcacccggatgggcgcttgatcattgccgatggcatcaagggcctgctcgccctggatgcaaaccgccaactcactaccttgagcacgggagccaataacgtccccttcggtttcaccaatgacgtcaccgtggacgccagcgggcgttatgcctacttcagcgatgcatcgagccgctggggttatgggcaggacggcgaagcggtgatcgaacatggcggcgatggtcggctactgcgctatgacttcagcaacggcaccaccgaggtgctgctcgaccagctgcaattcgccaatggcgtggccctgggcccggatgaacattatgtactggtcaatgagaccggcgcctatcgcatcagccggtattggctcaagggcgaacgtgccggcagccatgacctgtttatcgacaacctgcccggcctgccggacaacctcagtttcaatggccaggaccgcttctgggtggcgctgtattcaccacgtaacccgctgctggacagcttcgccggctaccccatgctgcgcaaagtgatggtgcgggcgttgatggtggtgcccaagccgatcgagcgcaaagcctttgtgctggggttggatacgcaaggcaaggtgattgccaatttgcaggatggcagcgcgggcaactactcgcccattaccaccgctcgggaatacggcgagtggttgtacctgggctcgctgaagagtacgagcatggcgcgcctgccgttggcactggcgttggcgccctgacgcaaaaagggcatacaggcgctcggcctgtatgccctggtggttaccggttaaacacgcttagctcttggtactgctgagcagggtctgcttgcacaggtggccaaagctgacgaactggacattgtcaccgccgacgccaatacccggatattcgagcacttccatacgccatacgccgtagttgaagtcggtacgccaggtgtttttgtagccctgggcgtagtcgacaaaggtggtctggaagtcaccgaagcaggtacctacgttgatcgtgccccctgccagaccggcgctgttggtggccgccgaatagcctttgtagacaatagcgccggtgtccgggttgatgtgttggtcgaggtagacgatcgggtgcagccccaccaacggtgcgccggtgctgtccgacagccccatggtccagctcaggtcgcgataggcctgggtggtcatgtagccataccccacgttggacgcggaggaaggaatgcgcaacacgttgccttcgcctttcacatcagggttgttcacccgagggttggaaccgaaggacaggttgtatttgcccgtcgcgctccaaggctcattcggatgttggttcggacgaacacgcaccttgaccaccccgccgacacccgggttcgggatcgacgtcgacacgacattcgcgcccacggtgacccactggctgccatcgaaacgctcaaggatccacttgttgcgcgtgctaccactggccgcgtcggccgtcagcgcgatgcctacgctctggccacggaccgccgtgaaatcaaagtagtcgacgtcgttgaggctgtcggcgttgcctttgatgtagttcagggtatccggcagttgaaacgccgtgtcgggcgtgtcattgggctcataggcatcgatattggcatccaccgccacaccgaactggaagctggaacccggcaccgctgcgttggcttccatgaaccagtagtagtcaccggcaggcaccacaccgctcaggctttcatcgcccgtgcctgggttattggaggtgcccagcgggagcggattgccttgaccatcgtcctggaacagggtcaacgacatgtcggtgcctgcggtctggccgaccagcaacgcgttgatgcgcgccttctgtggcaggttgaagtggtagcacagcaggtcaccggtctgcacgccattgagggtgtacaactggttcacgtccagcgtggtttcgcagccctggaccagtgccgcctgcacggcggccgctgcctgggcatcggctttcctgacctgggtcaccggcgccggcgcggcgtgatcttccaccaccgaatcggcctgggccttggcggcgaacgccggttttttcagttgagcgcccgctttgagttgctgcttgagcgtcgcaggggccttggtggccggtactttaccggcggccttgaggctttgcttgatgtcagtttgaacggcttgggcagccaggtgagggtattgctcggccagggcgaaggccgaaacgaagcaggaggccgccatggccgcgcccagcataaaggcttttttcgatttcattttttatccatccatagttaaaaagtgaagctcaggtgacgtccggtcacctgggatggaatgtaggatatgactggatggatgtacagtattttttgaaagaatttcaatttctatggaatggggatgtcacaccaccagcgccagaagctccagacagctgtcccgaaggcccagatatagccaactttataaggccacacaatccaacgcttgagcgccacaggaactgacgctaattcagcctccgtcacaatgccggcttccacatggcgctttgagtctgagaagaactcggaaataagcaacatgcgatattgcctgtcgatccactggtttcgcttccaaaatcgcttattgtcttggaccctttcgttctgacggaaataactttccacctcatcgagctttgcatattccgcaaaaatcatcagtcccaagacaacaaacgtcccgacaaacaacacgatggagtagatgagaaaaaaattcatggttaggctccctcgggtaggaatatcaaatccccatcgacttccatgatctctcctcccaaaaacgccccagcactaccgaccccctcacctcccacataccctcccgctgagcctccgataattccgcaggcgagttcacctgttcccttcatgcgaatgcctaggaacattgtgcatgccctacgagcggctcctgcgccgattcttcccaaaaaggcagctcctgagactccccccgccaacctccccgtctccacatacttcgcccgtctacactgcacctcccgcccctccacacacgcctccttgatctccaaccccgccactcccacatccagcgccaaccccacataagtccctttacccaaccacttcgacatctgcgcaatctcccgcatccgcttcgcatacccggcgatctcacctttatgcagatagctcttggtcgataggcccaatacctttttcagcgactcattgccctgcaaccccgtccccaaccgtgccgcaccgtgcagttgcacctccaaccgccggaacaacccctggcgctgttgaataaacgccgtcctgtccaacgcaccgtccttcaaccgctgatgcaaccgctcgatctcctccagcgtctgcgccacttcatccaagtgccgcgcccaggccgacgtcgcgctgccgatgccaatcgagcccttcgccatgaaactctgcagcaagtcatagttgtcgatcaccgtcgtgccggccgcagcacttcccttcagatggcggcgtacctcctcggcatgccgcatcaaccaggcctcctcgaccgagcaattcacgctgtggctgtcgggaataatcaccagttgccccggcgccaccaggccggggcgcaggtgccggttcaacacatcaaaatgagcggagcgctggcggctgggggcaccgcccatcagtcggtttttcaagctctgatagtccgttacgcggttgttgataaaactttgcgccatgcctcacatcctgtgagcagtgaagatggcgtcgaaatataagcaagcacctgcgccccggacacacgtccaggggggggcgatttacatttgggaagctgcctacgcagcatagaaatacagcctacggaaacaaccctaatacccagtcatttccaggtaacccaccccaccctcgaactgcaccgggccttcccagtacgggatactcaggttcatccaggcattcgggttgaccgcttgcgtggtgatatccagctgcttgccggggattttcagcgaccagcgagtggggatcttgcgcccttcaatagtcgtcgtatccagaggcgtcagttggatatctgcgttgtgcagggtttgtgtatggccctcgcgatcaatccaggtgccggtcaggtaggacgtgccatcggtttgccgtacacgaaacagcatcaattgctcgccccggtccaggtgcagggaaaaccagtcccagccggtctggctggcggtcagcggttggctgctccattcgcggtcgagccaggccgggccgctgacttgatacaccctgccgtcaatgctgacgctgccacgggcactgaaaaatggctggctgtagtagtacgaagcctggccctggtcggattttcggctgtagccgtggtcgccctgcagcaccaatggacggctggacgtcaggtgcaggtcgtaggcgaattgcgcaccgctagccttgagttgcatgtccgccagagggctctctgcaccagggcgggtggcgaaattccagtcgtcgatccaggcattgaacggcactgcctgagctccggcctggccgacgccgccgcgtgcgtaacgttcggcagcgtaatggcgggtggcggacgtaacggcggcgtggccgagccacacggtggagtcgtgccagcccgcttgcactggcccggccttgagcgcgttgcgaaacagcgtccactgcacgccgaagacattgccttgcgcgtccttgaggttggcggtgacgtaccaccattcgatacgaaagcccgcatgggggccgtggtcctcggggaagctgaacaccttgcccggcaccacctgggcaaagtccgccgcgtcgctgcccagaccggcaaagctctcctgcggcgcgggtactttgtcgcaagcggccagcagcaaacacgccaacaacaggggcttaatcttcattggcaaacgtcctcaacaaatccgcaggacggctgcggtacaactgccacaacggccaggccgacgccagcaaggtcgccagcatcgccagcccgagcaattgcgccagctgccacgggaacacctgcagcggcaggcgccagccaaacgcctgcacgttgatcactgcatccaggcaccaggccaacagcaggccgagcggtaccgccaggaccaatgtgagcaccgccagcagccaggtctggccgaggttgagcagcatcaattgccgacgcgtgacgcccaatgcccacagcggtgcaagctggcccaggcggctctggctctgggtcaacaggctgatgaacaatgccacgccggccacacccaaggtcaggctgttcagcgcggcagtggcggcgaaggtgcgctcgaacacctggctcgaccagcccttgagttgctgctgatcgacgatacggctgtcgtccagagcaaaggcgcgttgcacctcacgtaccagcggcgccacgtccggcggcgagacccgtaggttgaaacgcgccggtgacagcgtcggccagtgcgccagcagatgttgtgaattgaccagcacatgccccttggggttgccgtagtcggcgtaaacccccaccaccttcggcgaccacacaccttgaggcgtggggatgttcacggcatcgcccagcttcaccccgagccggcgcgccagttgctcgctgagcatcaaggtgtcgcccttctgcaactggtcccagggttcgctcgtggcctccagcagcggccaatgctggcggtaggtgggatcatcgaccacaccaaacaggtccgccggccagccctgcacttgcacggcgacctgccaggtgggcagcacggtctgcaccaacggctgttgcaccagccaggtgccgagttgttcggcctgggcaggggtttgtgggttgagatacagctcggcggtcagacgttgctccagccagttgttgaaggtatgccgaaaacccgaggtcatggagcccgcgccgatgtttgcggccagcgccaagagcaacgccatcagggccaggctcaaggccggcaactgctggcggcagtcggcgagaaaccactggccgagcaccgaacggctacgccccaacacggccttgagcaggccgttgagcagcaccggcaaaccgagcgccgcacccagcagcaaggcggccatcagcacaaacccggcagccaggctattgcccagccacagcgccagcaaggcgatcagcaaggcggcgccagccacccacgcttgacggcgcaaccaacgcccgtgggcttcatgccaagcctgggcattggccagcgccagcaagggcaggcgcgctgcccgccacaggctactggcaccggcgagcagcgcaccgatcaggctcaagcccagccctgcgccccaccaccaggggctgaggctcaactgccccgggacttcggcgccatacaaaccacgcaggctggcggccacatcgggcaataacagactggccagcaagtagccactggcgacgcccagcacacctcccagcaacgagagcacgcccagctccacactcaggctcacaatcagcatgcgcacgctgaccccacaagcgcgcaacgtacgcagcaacccgcgccgttgctccagggccaggccgatggcggcatgcacaatgaacagccccaccacaaaggacaggaagcccagcgcgtcgaggttcaggtgaaagctctcggtaaggcgtgcgaggttgttgtcctcgccttgcttgagctgcaacccggcgggcggcgtgggctggctggcggcgaatgccttgtccaccagcaggcgcgacaggcgctcgggcatctccagcacaggctgggcaaacccgatgtcggtgagcaacaggccgggcgccatgtctggttgggcttgcaatggcggcagtgtgcggccgcccacggtggtcggttgctggccttcgcgcagtcccaaggcctgcaaggtctgcggcgcgatccaggtacgccccggcggatcaaagaaggcgagcatctgcgcctggctcaagcgctgccccgccacggcgccgctgccgggcaacgacaacgggtcgatgcccatcaactgcaggcgtacctcttccaggcccttgagctgcactcgcccctgcaccaccggcgagaccggccacccggcgcggcgcaattgggcgaagatcgcctgggggaaactcgccccgtccggcgcaccgaggctggcctggggttcaccgccgatcaattggctggcacgggcatagctgtcacgcgcctggctgttgagggcttgcacgccgatcaacagtgcggtggccagccaaaggccggtgagcacgctgaaaaactgcacaggatgccgtcgccagtggctgagcaatgcgcgcaaggtccactgaaataccgccatctcaggcggcgcctgcggcgagaacgcgcccacgctgcaacaccacctggcggtccagccgtgcagcgatgcgcgggctgtgggtgaccatcaacaggctggtggggctgtcgcgcaagaggtccagcaacagttgcagcacttcgtcgctggtcgcctcgtccaggttgccggtgggctcgtcggccaacaacaggcccgggcgtgatgccaatgcgcgccccaccgccacccgttgctgctggccgccggagagctgttccgggtagcgcttgagcaaatcccccaggcccaggcgctcgaccagctgcgcctgccactgggggtcaaagcgtcccgccagccgcgcctggaacgccaggttgtcctcgacccgcaagctgccgatcaggttgaactgctgaaacaccaggccgatttcggtacgccgccaatgggccagttgcgcttcgctcagttgatccaggcgctgctcgcccacctgaatgctgccgccatccacacggtcgagcccggccaccaagtgcagcaaggtgctcttgccgctgcccgactcgcccatcagcgccaggctgctgcgctggcccaggtgcagatcgacaccggccagcaccgccaacggcccctggggggtggcatagcttttgatcacaccttgcacctgcaacatgacaacactcgtttgatgggcggccatcgagaataacggctgccgaccaaggccacgcaaatttttcacatcgatttcaccagctgcccacccgtgcctcattaaattacccaccaagcctcacttgccggcaacttgttagttgtcctttttcacaactttttacatgcaaggtgttcagcgaaaagacagccgtcgtgtgacagcctctggtcccactaaggacattcgctaaaacgttgcgcctaattaatacaagactgccaacaatgcccatggtgaatgaagtggttgaccttaccctgaccaaaccgcgctcgccccgggactttttcaagcgtttgcaacgactctggctgggacttgcggtggttggcctgctgctggtgtgcagcctgttctggccggcgtcgccacgggacctgggcatcggcaaccgcctgctgacctcgcaagtgatgccgctgtggcgcgacggcgacctgatcgtactggtgcgccatgaggagcgttgcgatcgctccgccaacccgtgcctgggcccgatggaaggcctcacggtacacggcagccaacaggccgaaaagctcggcaacgcctttaaatccatggggatggacaccagcgatgtgctcgccagtcccgctatccgcacggcgcagaccctgcgtttcatgttcgacaaaaacgagctgacctcgggccaacaggccatctgcggcacggccatgggcgaggaattgctcagtcaaaagacccccggacgcaatctggtgttcgttacccacagcggttgcatcgccgacttcgaaaaaacccagggcttcccccatgccgcgttccccgaatacggcagcgcgttgttcgtgcaggcattgcccaacggcaagttgaagatcctgggcatcgtcaacaatccggattggcctgccgcgctaaaacagacccactaacttactccccgccctgttcagcaaaaagacagccctgttctggcatgtttagttgcgccttttaactaaggacgtcatgaatattttctgcaattgtgtgaacgctgtgattttttccactattacttcatcacttgaaacccacatctcagagcgtcagggagcgacgtttgcatgacccgactaaaacccctgccggtattactgctggccttcgttgcgttttacctgctgcccctgggcctgcatggtttgtggatcccggacgaaacccgctacgcccagatcagccaggagatgcttcaaaccggcaactgggtggcgccgcatttcatgggcatccgctatttcgaaaaacccgccggcggctactggttgattgccctgggccaggcggtgttcggccaaaacctgttcggcgtgcgcatcgcctcggcgctgaccaccggcttgagtgtgctgctggcctacttgatcgcccgtcgcctgtggaatgacccgcgcaaaagcttcgcctgtgccctgctctacctgagcttcggcctggtggccgggcaggcggggtattccaacctcgacccgcaattcaccttctgggtcaacctgagcctggtggcgctgtggtttgccctcgatagtgccacgctgcgcggccgcctctgggcctgggtcgtcgtgggcctggcctgcgccatggggttcatgaccaagggctttttggccttggcgctgccggtgctgattgccgtgccgtacatgctctggcagcgtcgcctgggtgagttgctgcgctatggcccgttggcgatggtggtcgcagtactggtgtgcctgccatgggcgctggccatccatcttcaggaaccggacttctggcgcttctttttctggaatgaacacattcgccgcttcagcgccgacaacgcgcagcatgtgcggccgtggtggttcttcctgccgatcatcgccgtgtccagcctgccgtgggccggtctgctgccaacgactctgcgcaagacctggcaggaaaaacgccagccggcgatcaccttcctggcgttgtggctgcttctgcccctgggcctgttcagcttgagccgaggcaagctgccgacctacatcatgccgtgcctgctgcccctggcactgctgatgggccatacgatgatcgacctggtcaagcagggcaaagcccgcacgatctgcctcaatggcctgttcaacttcgtgatcggcatggcggccatgatcggcctgatctacctgcaaatcgcccggccgctgtacagcaacagccacgccgagatgttcagcttgtccctggccttcatcgtgctgctggtgtggattctcaccaacctgctgcaagtgattcgcccactgacgctgtgggcaatgcctgcactgggcatcggcctgctggtgatcctgttgccggcgagcatgccgtcgtggattgccgacaacgaaatgcccgaccagtttgtgcttgaacacctggaagaactgcaacagacccaggcactgctgagcaatgaactggggagtgccagcgccctggcctggcgcctgaaacgaccagaagtatcgctgtatgacaccgagggcgaactgcgctacggcttgcaatacgcgggctcggtgcatcgcaaagtggaactggacggggtccaggcctggctcaaggaggcgcgccagcacggctcggtgggcgtgctgctgcgggtcaacagcaccagtgaaatgcgcgaagccgggcaactgccgccaggcggcaaacgctactacaagggttatctcgaattgatcatctacccgagcctgccctgatgacacccttctggaagaccgaacgcggcgccctgctgctgttgctgggcgtcaccgcgctgttgctgctcaccggcctcggcgcacgcgacctgtggggcccggagacccgctgggcgaacatcgccttgcagatgctacagagcggggactacttcgacccctacctcaagggcaccccctattacgacaagcctctgccctcctactggctgatcaccgccacggcccacctgatgggcggcctcgggccgtggtcactgcgcttgccctcggtgatcggtgcgtggctgagtgtgtggctggtctacctgctcggtgagcaactgatgcgcaagggcaccgggctgatcgccggctggatgctcgccaccaccttttactttctgttctgggcgcgggtggccacggcggatgtgctgacggtgtgcggcgtgctggcggccgtctggtggtactggcgcgggccggacgacacccggctgggtcgctacaccgtgttcttcctgttgctggccgtgacctcgctgttcaagggcttgatcggttttgtgctgccgggcctggtcctgctgccgcacctgctcggcgagcagcgctacaagcgccatctcaacctgcgcttgctacttgcgctgctaatcgccgccgcggtatatgccgtgccgttcgtgctctcgcatatctacggtgcgcccacctatgggcaaagcggcctggcgctggtgttccgcgaaaacgtggtgcgtttcttcgacccgttcgatcacatgggaccgatctacacctacctgatttacctgcccgcctacaccctgccgtggctgccgtgctggctgctcggcctgtggctggcgctgcggcactggcgccagaccccgcccaacgtgcgatggctggtgtggggcctgggcctgttgtttgtgttcttcaccgccagtggcagccggcgcagctactacgtgttgccgctggtgcccttcgcccagttgctcggcgcctggtggctcagcgaacgcctgcaggccaggcccgccagccggccgcgctggtacaaagggttcgcctgcgccgccgtgttgatgctgctggtcattggcgtggcctacccatggagcaacggcaatggcggcgtcacccgcttggccgaggatgtgcgcagcgaagcggtcaaacgcgcgccgtgggagcaatggcaactggtgctggtggaagtggacaacaaggtgccgatgtacctgcaaaacggtggcaagccgttctactacgtggccgagacccaggacttcccgcgccagggcgacagcgcagcgttcatggcctggttgcagaaaaccagcggcaaggccttcgacccgcagcgcacgatcatcgtcgcgcagtattccaaggacgacctgacgccgttggcgtacctgggcgcggatcaccaggtcatcaccacccagccggacaatggcgagcgtttgtttcaaaaacgtgagggtggcagcgtggcgttcgttccctggtccaaatagacggcggtcttatcccttcaggctggcggcatggataaatgcctcatccaggctttgggcgtcgtacgcgtccatgaagccttgcgcgtcagtgaaccggttgaatcgcctttggctcagcatataaaaatcatcgcaatgcgcgacgatctcatcgacgttatgtgatgaaaccaagaccgcgacaccctctgccgcagccccctccagacagcgccaaatgtgataacgaaactccggatccacacccgcagtgggctcatccagtatcaccaggtccgcgttggcacaaagcaacgacaacgtaaaaaaccagcgtttctctccatagctgcagagcgcagattttttgttccagatctcgcagtaccgctcggcgatgccggggctccatttttcgattttatcgagtgcatgttgttgggtgacctgggtgtcggagcaaaacagcatggccattttgaagatgtcgaacatgcgaaatacagggggtgtgctgatgacctgcgacaggtacagcagcttggagaaggagctgcttatttcaccaccctccactttcttcaggccgcacagtacgtcaaaaaacgtcgttttaccggagccgtttgggccgagaaggcctgatatggagccggccatggctgtcagagaagccttgctgaacactacatggcctgggtaactgaccccgagtgagctgacgataagtttcttcattagtatcggctccagactgggtttatgagcaataaccgaaaggtcacgccaaaggaaatagaaaaggccaccatgacaaccagcatgacttctatcgatcccacgaccccctctagcattatttgattagcccatctcattggatttaacagcttgatgacttcgagggcagtatgagatgtactggcactgacaattccaagcgccaacatcaaacacaacaagacagaaaaaacagtactggcattttgaaaacttaatggagccaatgtaagcaacagcgaaaatatagagaacaagagaaagcagatataaaatctcgacgcaacatcccacacctccgacacttccactcccgccccaaaataaagtttcgtcagaccgtagaaaaccatgcagtaaactatcgacaagatggaacaagcaaaaaactgcccaaacagaaagaccagcttagtcggtttagcgtagacaaatgaacgcaagaagccactttctctgcgcccgacgatataaaacgccaggccgaaaaacgctacgctacaggcaataaaggcatagaaccaagatgtaacggctagataattgatcgtccgatcgtcatcgggcgtcctcgcataggtgatcaaatagaacgtcaccgcgggagaaactaccatccagaacagtgcaaccggttccttcaactgttccttgataaacaatgctgccagtaaaaagggtttggacaatagataaccgctcatgacttacctcgcaggaagcgtgaccgactctccatcaaaacttagcgtatctggaagaacattcaagatagcctacttttaacaggctcatgaacatgagaaatttcactcataaaaatcagacattcaataattgcatacgacgatttttttcgacccctcccacagcacatcaaaaccctcaacaagattagtaacttactgaacacactacaaaaacaatcagatgccttattacttaacatataccgaactgttgtaattttttttcagaaaaaaacgacaagcggcattgatctgcgatgcgccccctttggtctcgtagcagtaggcatcactcactgcgccatacacccgcaatcaagtatccggattgatcctgcttttgcgctccgcatcggcctcgcccgtgtccatccgcaaacccgccacctgcgcctgcaccgcccgcccctccgcccggttgcggatgaaaccggcccgggtgaaccgttccagaaacggcaccggcaaggctttgtcggcggttaccgcaggttgttcagccacatcgccaaacaaggtgtacgccgcactcggcaagtgccgggtgttgaggtcgctggtcagtcggcccgcttgcaggacgatagcgcggttggtcacccgttgcaggtcagacaagcgttgggaaatatagaggatcgccacgccccgggcgcgctggctgtcgatcaggccgagcaggcgttcggcgtcggtttccgacagggcggcggtgggttcgtcgaggatcagcaacctgggttgcagggcaaaggcccgggccagtaccagcagttggcgctcggcctggccaaggcgttccaccgggtgttgcagcggcaggtccaggcccagcccggcggcgatggcttcggcgcgttgcagcaggcttttgcggttgagcagaaaatccgcatcgggttgacccagttcatccagcaacaggttctcggccacactcaggccaggggcgatggcgtcgtcggggtcttggtgcaccgccacgatgccaacccgccgcgccgacaacggcgaggcaaagcgttggcgctgcccatcgacccacacctcaccggcatccgccgccaggctgccgctgaggatcttcaccagcgtcgacttgcccgcccccgtggcaccgagcaacgccacgccctcgcccgggtaaatatccaggctgacctgatccagcgcccgttgggcaccaaaggtcttgcacaggcccagcaggcggatcaggggctcgggggcaaccgggttgctcatggctaatctctaaggcggaacgatgactcattacaacgtgcgaacacgctgatttattccgaacaacaatgagttaggccccggattaaatgcattacctcaagaacaatccaatagctgaatcgcatagccaaatttttttgagttataaggcagttatttgcagcttgaggaatgcgttcagcaaagcaaccctgtggaccacagggacggcaacggcatcgttgagcgggacggctagtggcatttggtcatgctttgtaaagggccagcaaggcgtgtcgcttttaattgcaggacgtttcctagacaatctccgccgccttgtgcctgccggaatcggtggctagtctgcggtccgtcactggttttcagtgatcgggtttagtcgcccggaatgacacaaggcgcatggtcacatgaagttttatggtggctgtgcgcagggcaccttcgggtgcgccggatttccttgtggccggtcgactaacctgcgtacagccgccacccatcgtttagtcgcgccaggtgttggctcctattcacacaaggaactacaccatgaacaaagccctacccgacccaccgcaagacctcaccaaagaccgcgccgccttcaaccgcgccattgaccattacctgccgtcacaggggctccacgccctccacgaagacctgagcttcgaagacgccctgctctacaccgccagtttgctcgacagcgcatccactaccgcgctggattgtggcgagacactgagcaaccccgaacgggcgagaatcctggcggtctggcatttgctggagatcgccaaggcgacagtagatcgctccatcgagtgcctgaaacctgcgcctgcgactgcctgaacacggtcctacaaagcagcttacctatgtgcgtgagctgacttggtgagtcatcccgacaagagtgctttggttgctttcgactgggcaggcattctgtggcgagcgggcttgccccgcgttggagtgcgtagcgctcccagcttttttggggctgctacgcaacccaacgcgggacaagcccgctcgccacagttgcagtgttcgcccttgatggaatggtatcagccagatacttgaaagggctggccataagggcgtaaccctaagcagcggttacctaaataacggatatgcccccgtcaaatccgccgccgccgccccaactgcggaatagccgcctgaggcacctccacccgctgaacctgcgtcaacacacaccccgccaattgcgccaccgtcggatgactgaacaacgcccgcgcatccacctccacccccgccttgcgcatccgcgccaccaggttcaccgccaacaacgaatgcccccccagctcaaagaaatgatcgtgccgccccacccgctccaacttcagcacctcagcccagatcccggccatcaacacctccaccgccccgaccggcgccgcataggcgcggctcaccaccgcccccaaccccggctccggcaacgccttgcggtcaagtttgcccgccggattgagcggcaacgcgtcaagctgcacaaacgccgccggcaccatgtattccggtaattgctccagcacatgggcgcgcaacgcatccgggctcggcgcctcgccacgcacggtgaaatacgccaccaggcgttcatcgcgaatcaataccgccacctctcgcaacgccggatgcaccagcagccgtgactcgatctcccccagctccaggcgcacaccgcgaagtttgacctggaagtcgttacgcccgaggaactccagattgccgtcaggcaggtaacgcaccaggtcgccagtgcgatacagccgatcaccggccacgaacgggctgtcgataaagcgctcggcggtcatctgctccagccccaggtaaccccgggccacgccgacgccaccgatatgcaactgaccgctcacgcccatcggcaccggcgcatcgtgttcatccagcacatacaggcgtgtgttgttgatcgcccgcccaatcggcaactgcaatgccggcaccggcgcgccgggttccagggtccaggcgctgctgtccactgtggcttcagtgggaccgtagacgttatgcaggcgcaccttgggcaagcgcgcctgcacgccacgggccagggcttcggtgagttcgccgccgccgcacaacacatcggtgaggctgctgcacagcgcggactcttccagctcaaggaactgctgcaacatcgccggcacgaacttgatcaccgtgatctgctgctcacgtatcacctgcgccaggtaggccggttcgcgatggccgtcgggccgtgccagcaccaggcgcatgccgttggtgagcggccagaacagctcccacaccgaaccgtcgaagctgaacggtgcccgctgcaacagcgcgccgccctcggcattggggcacagctgcgagccccagtgcatcaggttgccgaggccacggtgttcgatcatcacgcccttgggtgtgccggtggagccggaggtgtacatcacataggccaggttggccacgctcagccccggcaccaacgggttgccgacaggtgcctggctccaggcgcagtggtcgaagtcgatcaccgggatcgacacgtcacccggcacgtcacgggtggcggcatgtaccagcagcgccaccggctggctgtcgtggagcatgtaggccaggcgctcgcgcgggtagcccggatccagcggcacataggcaccgccggccttgaggatggccaacaggcccaccaccagctccagcccgcgttcgacgcacagcgcgacgcgggcgtccggttgcacaccgcgctcacgcaggtggaaggccagttggttggcgcgttcattgagttcgcggtaggtcagttgcaactcgccggcctgcacggcgatggcatgggggatatgccgtgcgtgggcttcgaaccgcgcctgcaccgtgaaagtgtcggggtagtcggtgtcggtagcgttgaagtccaccagcagggttttcagctcgccggcgggcagtacctggacgtcgcgcaacggtgtctgtggcgcctggtccagcgtgtccgccaagttgatcagtgtgttttcaaggtagtcgagcagccgaccggcgccaatttgctgcggcgccttggccttgatccggaaacccttggccgtgtcgtccacggtcagcatcagcgggtagctgaggatgtcctcactgctgagcaaggcaatgcccggcaccagggtcaggtcacgctcggcgtcggtgtgccggtagttgagcaggctgttgaacaacggcgacgcgccgctgcaacgctgggccagcgcaagggaggcttgttcatggacgagcaaggcgctgagccgggcgtgggtgcaagtgagcgcatccgccaccgttcgcccggccaggcgcacccgcagcggcagggtgttgatgaacatgcccagggcgcggtcggcgccctcgcccgcctgcaaacggccgagcagcacggtaccgaagaccacgtcatcacggccggcgacacggctgagcacctgcgcccaggccaggtggaacaggctggcggtgctcacacccacgccacgcgccagggcacgcaaacgctgattgaggctgtcactcaagccacgttcggcttgttcggtgtgcgcccgatccgcctggcgctcctgtagaccgaaggccagggtcggctcgtcgacatcccccaactgctcgcgaaagaacgcctcgtgcgccgcttgacgtgccggcgaacgggcttgcaccaccacattgcgatacggcaccggcaccggcaactgcgcctgctggccgagcaagtgggcgcggatttcctgcatcaggatcgtggtggaggtggcgtcattgaccaggtgatggaaccgcagccgcgccacccaacgcgagtgctgcggctcttcggcatagtccagggccatcagcggcgcctggcgcaaatccagcggcgcgcacgcttcgcccagcggttcgacgcgcaattgcgcctggcgccacaccacctgcatcggttgctccagggcctcccacaccaggctggtgcgcaggatgtcgtggcggttgatcacctgttgcagggcctgggcaaatgcgtccaactgctcgcgctgcgcaaagctgaacagcgcctgttgctgataaggatcgcgttcatcggtgatgtggtggtagagcaagccttcctgcaacggcgccagcgggtagatgtcctgcacattggccgcgccgccggggatgcgcgcgacgataggcgccaggctggcggggtcgagttcggccagctccggcgcgtccacgtcactgagttcactcgccgccgccagggccgccagggtcggctggccgaacagcacctggacatcggcgcgcagcccgacctggcgcatgcgttgcaccaattgcacggccagcaatgaatgcccgcccagttcgaagaagtggtcgtggcgcccgacctgctgcacctgcaacagctcggcccagatctgcgcgagtacgctttccgcgccggcgtgcggtgcttcgtacaggcgggtgacgaatgcgtcttgggtgggtgtgggcagcgccttgcgatccagcttgccgttggcggtcagaggcaacacgtccagctgtacgtaggcggccggcagcatgtagtcgggcagcgacgcttgcaggtgggcgcgcagggcttcgatcggcaccgcttcacgcgggacgaaccaggccagcaactgcccttcgcgggcttgcaccacggcgtcctgaatgtgcgggtgagtggccaaggccgattcgatttcgcccagttcaatgcgcacgccacggattttcacctggtcgtcattgcgccccaggtattcaaggttgccgtccggcagccagcgcaccaggtcgccggtgcggtacatgcgcccttgggtgaaggggtcgtcgaggaaacgctcggcactgaggtcgggacgcttgagatacccgcgcgcgatgccgttgccgcccacgtacaactcccctgccacgccgatgggcagcggctgttgctgcgcgtccagcacgtacaccgtggcattgccgatgggtgcgccgatatgcaatggccggccgacagccatggggccagaggtggcgaccaccgtggcttcggtagggccatagttgttgatcacagcgaaggactgcgcctgggtgaacgcgcgcaagcggtcgccgccgatcagcagggtgcgcagtgtcgggtggtgcaggccctggctgaaggcgtactcggccacgggcgtcggcaggaagcacacgtccagcggctgcgcctgccaccaaccgagcagcgcgtcgatgtcttcggcgccgtcatgggccggcggcaggtgcagcgtggcgcccacgcacaacgccggccagacctcccaggccatcgcgtcaaaaccaaaaccggcaacgctggcggtgtggctgccggcatgcaggtcgaaggcccggcagtgccagtccaccaggttcgagacgctgtggtgctcgaccattacacccttgggcaaaccggtggagcccgaggtgtagatcacataggcgaggtgggaggggctgaccgctacgcgggggttggtgcccaggtggaaggtcgggcggtcaagctgaatcaccggcaccgtcaagggcggcaaccgatgcagcaaatcgtgctgggtcagcaccactaccgggtcgctgtcgtgcagcaagtaattcaggcgctcggcgggatgggccgggtccaccggcacgtagcaggcgccagacttgaggaccgccagcaaccccaccaacgtgtccagcccacgccgcgccaggatcaccacccggtcgtccggccgcacgccgctctccagcagttgatgggccagcgcgttggcctgctggttgagttgggcgtagctcaggtgccgcccctgatacaccgccgccacggcgtccggcgcgcgcgcagcctgggcttcgatgcgcgcgtgtagggtctgcggcggcgtgacgggctgggtggtggcgttccattgttgcaaccgcgcctgttcggcgggtgtcaccagggagaaatcgcggatcgtcagcgcggtgtctgccagcccctgctccagcagccaggtaaaacgttgcgccagggccgccacttcatcgtgctggaagtacgcctcgttgtagacgcaatgcaggcacgcggtgtcctggtagcgattgctgcgcaggtggatggccagcggcagcggctcgtggtggttggacaccttgactgcacgggccactgttgtgccgtagcgcagttcatggtcgtcctgctcgaaggacaccgacaggtcgaacagctggccgcggtcgctgcgacgcaggcccagctcgcggttcatctcgctcagagggaaacgctggtggcggaaatcctgcttgagctggtcgcgcaccccacgcaccaacgcgctgaacggcaactgctcatcaaactgcaagcgcacggcactgacctgggtgaacagcccaacggtggagcggaaccgcgcattggaacggttgagaatcggcaaccccacgacccactcctggcgttgggcggtgcgggtgaaatacacatacagcgccgccagcagcacatgaaacgccgacgcctggtaacggttggccacctgttccatgcggttgagcagtgccaccggaaacgcctgcgccagggtattgctcgtggccttggccgtgtgtcgcggggtcaacagcggctcgggaatcagccggtacttgcccagccaataggcgcggtcgcgggcataacgggcggacgcgtggtagtgctggtctgcgtcgataaagtcgatgtaggacggcgccggcgactccgcttgccggccttgcaccagggcggtgtacagctgcgcgagggattgcagcatctggccgaagccccagccgtcgaggatcaggtggtgggcctgggtgccgaggcgatagtggtcgtcgtcgagcttgaccaggaaaaagcggaacagcggcgcgccctgcatcgcataaggccgggccatttgcgcctgcatcagggcgtggctcgcggcctgcggatcagcacaagctgacacgtcatgccgcgccagttccacagccaacgtcgcagcgaaagtctggcgaggcaggccgtcggcgtcgctgtgcagttgggtgcgcaacgcgtcgtgcctggcgaccagaagttcgacagcgcgctgcatcaggccggggtcgatggcgccggcaaagtccacataaccaccgatgttgtacagcggcgagtcgcctgcgcgcagttggtcgagccagatgtcctgctgggcggcggtgagggggaagctgggtgaatgcttcataagatccttctcatggaggtcaggcactggccgcgcaggggtgcccattacgacgaatgggccggattggagcatgggggccaggggctgtctgtcaccctaaacccggacattcaaatggatagaccaggcttggctgatggttcactgctgaaacgattaaagagttgtaggacattggctatatttggccgatgccggtttgaattgaacatttcaaaaaatatatttttatcttatttatcatagagttaattaaccctaaaaaatccgcttggtgactcgtagtcggaattacctctcagaaacgtcgaattaatgacgcggtttctatggcaggttgtgtccctcgtttccgctacatacgtaggacaaatccactggctaaatacactttcgaataccgactctggtgtgtgagcaacggatcgcccccgcagaggcccagagcgtctgtacacggttttcgatatcaaggatgagaaggctatgagtttgaccagcagtattgccaacacccaaagcccgcatttctacgctgaaatgggcgagttgattgccagcagtggccacccgggctttgccgcccacatgctgcacctggtggacaagtgggtgccgatccacctggtggatctgagcgaatggaccctcgacgagctgcgcgaccgtgtgctcgatatcacgctgctgggcagcgccggccagacgcaggacctgccgcctctggccctgaattccatggacgaccacccgctgctgcgtgagatgctcggcatgcaggacccgctgctcatacagttgaaggccaaggccaacagcgctcacccgcgcggcacctcgcaccagtgcaacctggtgtcgcgccagggcaaccggcgctgtgtgatttcgttttatcgcccgccgacccagcgcgggttttccctggccgagttgtcgtttctcaagtgcctgtcggacacgctgctgccgctgatcgagtgccacgcccagagcctgcgccaggcaccgcacaccgaggtcgaaccggcccacacgttgctggagcagtcgcaattgcaacgtgagttctacaaacgcctgtccctgggcgacatcacgttgtcggcgcgcgagcaggaggtgtgcctcggcttgctgaccggtggcaccgtgccgcagatcgcggagaaactcagcgtgaagaacagctccatcgagacctacctcaagcgcgccgccgccaagttgggcgtgagtggccggcacggtctggccaagtggatggtgggcgcctgatgcataaattgagcaccttcgcgatggcctggatgctcggcggctgctcgctgatcccggactaccaacggcctgcggcgcccgtgcctgcgcagtatccccaggctggcgtgtatgcgctggcgcaggccggcacgtcggactggcagcagctgttccacgacccggcgctgcaagggttgattggcgatgcgctggtcaataaccgcgacttgcgcgtggccgcgctgaacgtcgaggcgttccaggcgcagtaccgtatccagcgtgccgacctgttcccggccgtgtcggcgaccggcgccgggcagcgccggcgtgtgccgggcgacgtgaccggcacgggcaaggccgccatcacctccagctattccgcgaccctgggcatcagcgcctacgagctggacctgttcggccgcatccgcagcctcagcgaacaggccatgctcacctacctgggcaccgaagaggcgcggcgcactgcacagctgagcctggtcgccaacgtcgccaatgcctacctgacctggcgcgccgaccaggaactgctggccctggcccggcaaaccctggtggccaacgaacacagcctgcgcctcaccggccgcagtaaaaccgccggcaaagcctcggcgctggacgtggtgcaagccaccaccagcgtcgaaagcacccgcgccagcgtggcccgctatgagcgccaggtcgcccaggacctcaacaacctcgccctgctggtaggcggtccggtggacgaacagctgccgtcgcgtccacttgccgccgacctggtggcgcgcgtaccggccggcctgccctcggacttgctgcaacgccgcccggatatcctccaggccgaataccagttgcgcgccgccaacgccaatatcggtgcggcccgcgcagcgtttttcccgtcggtgagcctgaccgccaacgccggcagcgccagcaccgaactgtcggggctgttcaagggcggctcgggcagttggacgttccagccgcagatcaacctgccgatcttcaacgccggcagcctgcgcgccagccttgactacgccaaactgcaaaaagacatcagcgtggcgcagtacgaaaaatccatccagaccgccttccaggaagttgccgatggtctggcggcgcggcaaacctataccgaccagttgcaggcgcagcgggatttcgtcgcggccaaccagcagtattacaacctggccgagcatcgctaccgcagtggcgtcgacagcaacctcaccttcctggatgcgcagcgtgcgttgttcagttcgcaacaagcgttgatcgtcgaccgcctggcgcaactggtggcggaggtgaagttgtacacggcgctgggcggcgcgtggaacgtcagtgcaagcccgactgccgcagccgatactcccccggcgtcacctgcgcataccgaaggaaaaaccggctgaaatacgccgggtccttgaagcccaactggtagcagatttcgttggcggaactgccggtgaacagcaacaagcgcttggcttcctgcatcacacgttccaggatcaggcgcttggacggcaggtcggccaggcgccggcacacctcattgaggcgcgcctcggtcacgccaatcccctcggcatagcgcgacagcggccagtgctccagatagtgggcctcgatcaattcgttgaagcgatggaagatgcgcaggtcttcgtgccgggtcgggcgcgccggcagtgagtgggcgcacaggcgcagcaggcgaatcatgatcaggcgcgtgaggctgtccaatgcggcggcgcgccctgcccgcgcggcgttgatctcatcgttgagttcttcgaacagttgatccaggccgtggtcacccgccgtcagcgccacgcaggccgcgccggaagccaggctggggtcggcgtcgatcagtccccacaccaactgctggcgcaccgtcagcacatgcccatcggcatccgcctcggtgacaaaggcgtggggcaccgtgggcggcgtgaggaagaacatcggcccggactccacgaactggcggtcatccaggtacacccgcaccgcgccgctcttcacgtaatgcacctggaaaaaccggtcatgccgatgcacgggcatgttgcgcccgaaaaatcccgccaggttgccgagcttgtcgtaatgcacctcggcatcgctgtaacgctggtcgtagacctgcccgatgttgatgttggggatcggcttcacggtgccctcttcttgttgttatgacgccagaggattttgccacgcttgacggtagttaacatattaattataacgttaacacattaacgaactgcctatgcagcagtcgccaccgccaggagaaacgcatgagccgtaccctgcatgatgttgccagcggcaccctgttcggcgtcgcgctgaactaccagggcctgctggaccagcatctcgccgccttccagcaggcgccctaccagaagccgccgagcaagccggtgctgtttatcaagaccccgaatacgcgcaacgagcacgctggcgtggtgctgcaccccgagggtgaacgcctgcaacccggccccgcgttaggcgtggtaatcggccagcgcgccagtcgtgtcagcctggaaaacgccatggcccatgtggccggctatgtggtggtgaatgaattcagcctgccggaagacagctactaccgcccggccatcaaagccaaatgccgcgatggtttttgcgtcctcgggccacagttagtcccacgggaccagctcgccaaccccggtcaactgagcctcaagatgtgggtcaacggcgaactgcgccaggaaaacaccacggccaattgggtgcgcgatatcccgcaactgatcgccgaaatcagcgaattcatgaccctgcatcccggcgatgtgttgatcaccggcacccccgaagggcgcgtcgatgtgctgccgggcgacagggtagaagtcgagatcagcggcgtgggccgtctgctcaatcacattcaagcggagaccccagcatgaaacacgcccgtatccgctttgaaggtgaagtgcacgccgtacaggtgcaagccgacaacaccgtgcgtttgagcgatggtcgcctgctcgtcgaagaccaggtgcagtggctgccaccggccaccggcaacatgttcgccctgggcttgaactacgccgaccatgcggccgaactggccttcaccccacccaccgaacccctggccttcatcaagtccgtcggcacctacaccggccaccgccaggtcacctggcgcccggacaacgtcgcctacatgcattacgagtgcgagttggtggcggtgatcggcaaggccgcgcgcaacgtcaagcgcgccgacgccctggcctacctgtccggctacacggtgtgcaacgactacgcgatccgcgactacctggaaaactactaccgccccaacctgcgcgtgaaaaaccgcgacgccaccaccccggtcggcccgtggatcgttgatgtggccgatgtgcccgaccccggcaacctgaccctgcgcacctgggtcaacggtgagctgcgtcaggaaggcagcacccgcgacatgatcttcgacatcccctacctcatcgaatacctgtccagtttcatgaccctgcaacccggcgacatgatcgccaccggcacgcccgaaggcctggccgatgtggtgcccggcgatgaagtggtggtggaagtcgaaggcgtgggccgtctggtcaaccgaattgtcagcgaggcggagtttttctccgcccggaaagaggcgtgagcagcatgatcaaacactggatcaacggccgtgaggtcgaaagcaaagacaccttcatcaactacaacccggccaccggcgaggcgattggcgaagtcgccagcggcggtgccgaggaagtggcccaggccgtagcggccgccaaagacgcgttcccgaagtgggccagcaccccggccaaggaacgcgcacgcctgatgcgcaagctcggcgaactgatcgaacagaacgtgccgcacctggccgaactggagaccctggacaccggcctgccgatccaccagaccaagaatgtgttgattccccgggcgtcgcacaactttgatttcttcgcagaagtctgcacgcgcatggatggccacagctacccggtggacgaccagatgctcaactacaccctctaccagccggtgggcgtgtgcgggctggtgtcaccgtggaatgtgccgttcatgaccgccacctggaagaccgcgccgtgcctggccttgggtaatacggcggtgttgaagatgtcggaactgtcgccgctgaccgccaatgaactggggcgcctggcggtggaagccgggattcccaacggtgtgctcaacgtgatccagggctatggcgccacggccggtgacgcgctggtgcggcacccggatgtgcgcgccatttcgtttaccggcggcaccgccaccggcaagaagatcatgcagaccgccggcctgaaaaagtactccatggaactgggcggcaagtcgccggtgctgatctttgaagatgccgagcttgagcgcgccctcgatgcggcgctgttcaccatcttctccctgaatggcgaacgttgcaccgccggcagccgcatctttatccaggaaagtgtctacccgcagtttgtcgccgagttcgccgcccgcgccaagcgcttgatcgtcggtgacccgcaggatccgaagacccaggtcggctcgatgatcacccaggcgcattacggcaaggtcactggctacatcaagatcggcatcgaggaaggcgccaccctgctcgccggtggtctggaacgcccggccaacctgccggcgcacctgagcaaaggccagttcatccagccgaccgtgtttgccgatgtgaacaacaagatgcgcatcgcccaggaagaaatcttcggcccggtggtgtgcctgatccccttcaaggacgaagccgaggccctgcaactggccaacgacaccgagtacggcctggcctcctacatctggacccaggacatcggcaaggcccatcgcctggcgcgcgggatcgaagccggcatggtatttatcaacagccagaacgtgcgcgacctgcgccagccgtttggcggggtgaaaggttccggcaccgggcgtgaaggcggccagtacagcttcgaagtgtttgccgagatcaagaacgtgtgcatttccatgggcagccatcacattccgcgttggggtgtttaacccccgccaaggcgctccaacaacaataatgaacctggagaatcatcatgggcgaagtggtcctggcagcgaagatctgccacgtgccgtcgatgtacctgtcggaactgcccggcaagcatcacggctgtcgcgaagcggcgattgccggtcacaaggagatcggccgccgcgcccgcgaactgggcgccgacacggcagtggtgttcgacgtgcactggctggtcaacagcggttaccacgtcaattgcggcgagcggttccagggcacctacaccagcaacgagctgccgcacttcatcaagaacatggagtacgcctaccccggttgtcccgagctgggcgcgttgatcgccgccgaggccaacctggccggcgtgcgcagcatggcccacaacatcccgagcctggagctggaatacggcaccctggtgcccatgcgctacatgcacatggacgtgccggaggctgagacattcaaggtcatttccatcgccgcctggtgcgcctggcaccgcctggaagacagcttcgcattcggtgccgccgtgcgccgggccatcgagaagagtgaccgcaaggtactggtgctggcctcgggctcgctgtcgcaccgcttttcggacgaccgccaggccgaggcgaatatccacacctggacccgcgaattcgacaagcaagtggacctgcacgtggtggagatgtggaagcaaggccgcttcaaggagttctgcgcgatgctgccggactacgccgagcactgcttcggcgaaggcaagatgcacgacaccgcgatgctcctggggctactcggcgggccggattacgccaagccggcggagatcatcacaccgccgttcggcagttcgggcaccggccagatcaatgcgattttccccctgtagaaccgggagcaacccatgccgcactttatcgccgagtacaccgacaacctcgaaccacaggccgacctgcccggcctgtttgaaaagatccaccgcgtgctgggcgacagtggcgtgttccccctcggcggtattcgcagccgtggcgtacgcctggacacctggcgcatggccgatggcaagcacgactacgcctttgtacacatgaccctcaaggtcggccatggccgcgacctggccacgcgccaggcggtggccgaagcggtgttcgcggtgatcaacgcgcactttgccgagttgcaggcgcaacgtttgctggcgctgtcattcgagatggtcgagctgcatccgcaactcaatttcaaacagaacaatgtgcatgcgttcctgaataacccggcggggtaaacccgctgttctccccacggcctctcagacaaaaagtacaacatcatgagcacagcccactccaccgccagccgcgtgctggccgagcacgaccgtacccatcgttcagtgacgtggcgcctgatgccgctgttgctggtgtgttacctgttcgcccacctggaccgcatcaacatcggcttcgccaagatgcagatgagcagcgacctgcagttcagcgacacggtctatggcttcggcgctgggctgtttttcatcgcctatgcgctgttcggggtgccgagcaacatggccctggaccgcgtcggccccaggcgctggatcgccagcctgatggtggtgtggggcctgttgtccactggcatgttgtgggtggagagcgcccgtggtttctacgtgctgcgctttttgctgggggtggccgaggccgggtttttcccggggatcctggtgtttctcaaccgctggtacccggcacgccgtcgcggccaggtcaccgcgttatttgccatcgccgtgcccatggcaggggtgttgggcgggccgttgtccggggcgatcctggaacacttccacgatgtcggcggaatgcgtggctggcagtggatgttcctgatcgaaggcctgcccgtggtgctgctggggctggtggtgctcaagtggttgccggacggcttcgacgcggtgcactggctgaccgccgagcaaaaacaccagttgcgcgaccaactgcgcagcgaggaacagcgcaagaccatcacctcgttcggcggcatcctgcgcgacccgcaggtatggctgctggtggcggtgtatttcgcggtgatgctggcggtgaacacccttgcgttctggatgcccacgctgatccatggcgccggcatcggccgcgacagccaggtcggcctgctcagtgccgtgccgtacctggccggatgtttcttcatgatcggctgcgggcgttcctccgaccgccatcgcgaacgccgctggcacctgtgcgtgccactgctgatggcggcggtcgggatcgccgtggcgggcctggcgccgggcaatccgctgctggtgatgggcgggctggtgctggccggcatgggcgccagtgccgccctgccgatgttctggcaactgccgccggcgtatctgtccaccaccacccaggccgccggcatcgccatgatcagctcgttcggcagcgttgccgcgttcctcgcgccgtacctgatcggctggatgcgcgacgccacccagagcgccagcctggcgctgtacgtactcgccttgttcatcgccctcggcggcctgctggtgctgcgcacccacgccgccatcgtcaacccacattaaggaccgttgccatgctcaccccccagcaaattctccaggccgctgcgcacctggaccgcgccgaacgcagccgcgaacaggtgcgccagttttccctcgactaccccggcatcaccctcgacgacgcctacgccatccagcgcgcctgggtcgcgcaaaagatcaaggacgggcgcaccctgaagggccacaagatcggcctcacatcgcgggccatgcaggtctcgtcgaacatcaccgagccggactacggcgccctgctcgatgacatgtttttcgacgaaggcagcgacattcccttcgaacgcttcatcgtgccgcgagtggaagtggagctggcgtttatcctcggcaaaccgctcaagggccccaactgcacggtgttcgatgtgctcgacgccaccgagtgggtgatcccggcgctggagatcatcgacgcgcgcatccagcaggtcgacccgcagaccaacgcgacgcgcaaggtgttcgacaccatctccgacaacgccgccaatgctggcgtggtgctgggcggccgtgccgtgcggccgaccgagatcgacctgcgcaaggtgccggcggtgctgtaccgcaatggcgtgatcgaagagtccggcgtgtcggccgccgtgctcaaccacccggccaagggcgtggcctggctggcgaacaaactggcaccctatgacgtgaccctgctgccggggcaagtgatcctcggcggctccttcacccgcccggtcgcggcccgccctggcgacacgttccatgtcgactacgacctgcttgggtcgattgcctgccgcttcgtctgaaccctggaggattgccatggacctgcccatcaaccgcttcaaacaccgcctgcacagcggcgaggtgcagatcggcctgtggctcggcctggccgacgcctattgcgcagagttggccgccaatgccggtttcgactggctgctgatcgacggcgaacacgcgcccaatcacctgcaaggcatgctcggccagttgcaggccatcgcgccctaccccagccaggcgctgatccgcccggtaatcggcgacagtgcattgatcaagcaactgctggatatcggcgcccagacgctgctggtgcccatggtcgaaagcgccgcccaggcgcgtgagctggtgcgagcgatgcggtatccgccccagggcattcgcggtgtcggcagtgccctggcgcgggcgtcgcgctggaacagcattgccggttacctcgaccaggcggatgaacagatgtgtctgctggtgcagatcgaaaaccttgagggcctggcgaacctggacaagattgccgccgtcgagggcgtggacggtgtgtttatcggcccggcggatttgagtgcatcgatggggcatcgggggaatccggggcatccggatgtgcaggcggcgattgaggatgcgatcaagcgcatcgtgcagtcgggcaaggcggcggggattctcagcgcggatgaaaacctggcgcggcgctacattgagttgggcgcgacctttgtcgcggtgggagtggataccactgtgttgatgcgtgggttgcaggcgctggcaggcacattcaaaggcattcccgaggctgaccacagcggtggaatctactgaaatctcatgtgggagcgggcttgctcgcgaatgcagtggtacagccagcccattctctgactgacccaccgcattcgcgagcaagcccgctcccacattttgatcctcagtgttcgaggcgttgattcaacgcttgatattgatgttcttcaagtcatccagcagacccagcagggtctgcaacttctcttcgccaaactgatcctgcaaccgctggtagttggcctccatgcactggctcatcgactcgaaactcgccttgcccttgtcagccaacgtcaccagtacccggcgctggtcctgctcggccttgcgccggtgcaccatgccggcggtttccatgcgcaccagcacgccggtcatgctcggcttgaggatgcaggccagttccgccaattggtaaatctccagttcaccgtactgttcgaggatgcggatgatccgccattgctgttcggtcaggccgtgttcattcagggacgggcggaaaaaactcatggcggcttcgcgggcttgcagcaaggccagggtcagggattgtcgaggtttggacatagggatcagggtcacgaagtatttagttaataatttaacgaaactctaacattccctgccggcgagcgcgctataacttgtcgagtgcaccgcccatggcgcgctgaatcaaatgcatgggcacgcagggtcaagacttccatctcgccagggcccctaatggaggtatccgctttagagccttccttcacttttcaggctgcgccatgatcaacatcgaaacccccacgtattacaccgccaccaagaaatacaacttgagctttcccaccctggaacaggacatcgacgccgatgtggtggtgatcggcggcggtttttccggcatcaacacggccctggaactggcggaaaaaggcatcaccaatatcgtggtgcttgaagcgcgctacctgggtttcggcggcaccggtcgcaacggcgggcagatcatggcgggcatcggccatgacctggagaagatcaagaaggacgtgggcgaagacggcctgcgccaggtgttcgagatcagcgacctgggcgcggacatcatcaagaaccgcatcgccaagtacaacatcgacgcggacttctgccacggctacggctacatgggcttcaacgcccgccaggaaaaaaccctgcgcgcctgggaaaaggacttcaagtcgatcaacagccagcacgaaatccgctttctcggcggcgcggatgtgcaacagatcatcggttccaaggcctacagcagcgccctgctgcacatgggcggcgggcatgtgcactcgctcaacctgctgctgggcgaagccaccgcactggccggccatggcgtgcggattttcgagaacagcccggcgctggaagtcagctacggcgaacgcatcaccgtgcgcaccggccgtggctcggtacgcgccagcaaactgctgtgggcctgcgacagtttcctcaacaagctggagccggagctgcaccgttcgaccatcaacacctacgcgttccagatgatgaccgagccgttgtccgaggagctgatccagcgcatcagcccgattcggggggcctacagcgacattcgcccggtgatcgactactaccgggtgaccaacgaaaaccgcctgctgttcggcgccgcaacgccgttggtggagcatattcccggcgacctcaaggcctggaaccgtcacctcatgctgaagatcttcccctacctcaaggacgtgaaaatcgacctggcctggggcggcccgatggcgtgcagccccaacctgttcccgcagatcggcaccttgccggggcgcagcaacgcgtttttcgtgcagggctattccggttttggcgtgaccccgagccacatcatctgcaaggtcctggccgaaggcatgagcgaaggctcggcgcgctacgacctggtcagctcgattcatcgcccgaccatcatcggcaaggacgcgatccgccccttgctgctgacggcgggcaaatcctggcaccagctttccggctattggaacgggcgccgctaaccgcattttttactcaactggagaactgccatgcccctcacccccctcaagcacaacgtccaactctcggaactcgaaccttggggcaccgtggccgacctcggctccgagatcctcgaaggtgacgtgcgcgccttcggcaagatgacgttcggcgcgcccaccgacccggtcagcagcgcttatttcggtaccacccagggcaagttccgcatggtttatccgtttgctgaacaagccacggtggtcactggggaagtgctgctgaccgacgaatccacgggccacacctcgcgctacaaagccggtgacagctggttcgtgaccaaaggcacgcccgtgctgtgggaagtgctcagcgaaagcttcgtcaaacattacttcgccgtcgtgtaagggaggggttgccatgacgagttctcccgactggattaccgtcggcgcactggccgacggtttcgctccagacgccttcatcctgcccaacctggccgagctggcgggccaggcgttcaccctgcatttcgccaatggctggcagatcgagcaccgtttcgagcagcaccgcctggcctggcacgccgccgatggccactccagcggcagcgcaccgtaccgcgccacctcgattcgcccgggcctgtacctggtggatttcatcaagcacgaggccgggcatagctggtcgatcagcctggtgctggacacaccaaacgcctcgttcactgccgtgatcgggcgcctgccggaccaggccgagacccacgaaggcctctaccaccgtgccctggccggcaagccgctaacctcggtggaagtcgacttcctccacggcagcctcgaccgcccgtggcaggccggccactgccggcatgcgcccaccgaggaactggtgggcctgcgcaaccaataccgctacagccccagcgaggtctacgagcacatctacctcaacgagcggttctatgcctggcaatgcctcaaaggcgtggagcaaggcctgtgcgacaccgaccgctgtcactactacaagatcgccgaacagctgtacctgttcgtgtggcaggagaagatcgtgccgaccctcggcctggtgctgatcgacctgcagcagcaccgcagcgacggcaagatcttcggctatgccggtgcgtctttcgatgcgctgtcgaatttccccatcagctcgtattgccaggtgctcaaccgcacggagtatcccgatgactgagccgcgcacggtctaaatgtgggagggggcttgcccccgatagcagtgtgtcagtcaccacaggcttggctgaaccaccgctatcgggggcaagccccctcccacatttgatctcctttgttttgaagatcccgtttatgcccccaccgcctgcatccggcttgaacggaaatccttcggcgacacctcgaactgcttcttgaacgaccggctgaagtgcgccgagtcggtaaagccccacttgtaggcaatcgaggtgatcgactcgctgcgcaggcacgggttggtcaagtcatctgcgctgcgcttgagccgcgcgcgctggatgtagcggcacacgctatcgtcctgttcttcgaacagacggtacaggtggcgcaccgagatattcagccggttggccaggccgatcgggctgagccccggctggctcagggattcatcgatgaccttctgcacgtagctgcgcaggttgctgccctgcagcgctgccaggccgtcgcggcactcttcgccctgctccagggccgatcccagcagcgacacgaaagccatctgcaacgcctccacttcacccgcgccgtctgcggtggcgtccttgcacagttgatccatcagcacatgcagcatgcgcccgcaggctttggtcgaggagatcttgccgaaagcccgtgcgtcgccgcccaggtgcttgcacacctgcggccgcgagagtgacagcgaggcgtgttcgatcaggccgaagggggtgatttcgatggagcccaccgagtccatcaacagcatctcgccaggcgccagttgcagggtctggccgttctgcgcgatctgcgaatagccgctgcgttggctgaccaggaaacagtcctggtcgttgtcatggtcggcgtggtgcgccgggcgtttgatcagcccggcattggtgcgcaggatggccacgccgcgcggcaagtctcggatctcgccgatgaacagcgagtggttgaacgccagttccgtctcgaaataaccgcacgcggcgcgtagctcgcggttccaagtgtccagcccgtcgtgtgcatgctgtgggatgctcatggggtgtctccgcaatggcttctttttgttgttctgatgcaatagttaacatgttatctatatgcacgcaacaacaacctgtgtgcccattgcgcaagcactaatgatgccaatcagaggttcgacaacacccgattcaacccgaccagcgccgcgagcaaatgactgcgctgcaccgcgctcagggcgatataacgccgaaacgccggcaggcgattgaccacctcgctgccgcccatatgctccaggcgcacgcaccattgctggtcgtgcagctcgatgcgcagacgcttgaaatccagcggcatcagcgcctggaacaacgcctcatcggccaacaagcgtgcctgcaactcacggcccaatgcctggttgccggcacggcgctgcacacgaattccatggcgccggatcgcgccgccatggtgcaccgcgaaactcgccgtgccgcccgtcgcagtcggtacgcgcaggacaaactcggtcagcaccaggtgcatcaacaactgcgactcggtgcgctcgacaatctcgaacgccacgccgtccacttcaagcgttgccagcccaaggttgcgccgcaggtgcgccagggtcacccccggtcgataccccgacggtgcacgatcggcacgccacagctcaaacagtctttgccgcaaagtcgccataaccgtcatcagcctgctccggttggttactgaactcctttgccaatacctcctccacagaggccggcttgaaggggttgaccttctgcaccaccagggtccagaacagtgcatacgccgccgtaccggccagcatcacgccaaacggcacatagatgtccgccggggtcatgcccggtggcgtgatgaaccacatgcccagcaggatgccgatgctcgacacgatctgcggcagcgggaaccacggcgagcgataggcccgtggcaagtccggccgccgaatacgcaggctcaccaccgagatcgtcaccagcaggtaggcaaagctccacgcacacaccgctgccagcaccaggtgcatgatgttgtcggtgttgccacccaggtacagcgcgtgaaggcagggaatcagcatcgccaccaagatgcacagcagcggcgtcttgaaacgtgggtgcaggtaggtgaaaaccttgggcaacgccccgtccaccgccatgccgtagagaatccgtggcacgccggccatcaaggtattgatggtggccgcgccggcaaacagaaaaccgatgcccagacacagcgggccgatctgccccatcacctgctcggcgaacctggggatggccatgggcgtgtccagcaggtgcacgcccgaggcggcatcgagcaccacgttttccacctggcgtttcatcgccgcgccatagatgaacatgcaggtggccacacccatcagccccagcatcatcgcgcgcggcatcaccttggccgattggcgcaggtccggcgccagcggcgtgacgaactcgcaaccgacaaacatgaacatcgccatgcccaccagcgacagcacggtgatcaggtcggtgcccaccagcgactcaccgaaccagccttccaactgcacagcgggcgcggcgatcaagcccagtacgccaaacaccatcagggtggtccacatgccgaaggtgaggatgatttccgcccggccaaaagcactgacgccaaaggcgttcagcaccccaaagacgatcacgaaacccacgccgagcaaccatgacccacccgccgattccgccagggtgttcaagtgttcgaagttcaccagggccatgaccccggacaggatggtttcagcagtgccggcaaacacatgcacgatcaggtacgccgacaaggtgccggtgatcgcgaaaaaccgccccatgccgcaattgatgtagtcgtacaccgagccggtggtgggcaggatcgaggcggcctcggcaaaggtggtggcctgggccagcatcattaccacggcgatcagcatcgccagggcgaacgcactgccgccgatgccaaagcccatagtggcggtgaggatcaccgggctggccatgatcaggccaatggtgctggccaaggcggtggggaaacctaccgtaccccggttgaggtgcgcggtgagtcggtcgttgatcgacatggtggggtcctcgaagacggtttttttaatgtatcggtactctgcgccccactcgaattgatcgtcttgcccctgtctgccgccggttttgttgctccctgccacagcgggcggcgtggcggccagggtcaattgcctggcacgcagagaaaagactcaggcccccgccactcgccctaatgcgccctcactcttaaccaagctggggacaataacaatggagcacacactgaaaaatcgcggcctgcgccaggcggtcggcctggggattgcgctgctggtgggccaagcccaggcggtcgagctttacgccgatgccgacacccacgtcaccggcaacttccttgccgtgtacgggatgttcaacagcaagaagaactacgacgggcgcaacggcggttccacctggcgcgaggccttcatcaagtacggcctgagcgtcgaccagagcctgggccgctttggcggcgtgtatggcacggccaacctggtgagttccggcacctggggcgatggcgatgcctccggggtcaccacgggcaaggagcgcaccaccaagttcgacgaagcctttgccggctggcgctcgggcgagctgttcccggcgttgggcaaggacggcgtggacctgtcgttcggtcggcagatcatcatgctgggcgacggttttctcatcaacgacgacggccccaatctgggcaagggcgtgggtgacggcgagttcaaccgtggcggtgcctactacatcgccgcacgccatgccttcgacaagactgcggtgattcgcctcggcggcaaggacggcgtacatggcagcctgatgtggatcaagtccgacaaccccgcccaggccatgaccgaaatggccgccggcaccctggagtacagcgccgcgccgggcaccctggggctcacgtatattcatggaatcgatgtggacgagcgcttcgccagcgacgtgcagcgccagcgcaaaggcatgaacctgtacagcctgcgcggcgccggcaatgcaggtatcgacaacgcgcacttcgcctttgaactggcccgccagaaccgccgcgacagccagcagaacgccggctacgccgaagccggctacaccttcgccgacctgccctggtcgccggacttgacctaccgctacgcgcgctattcaaagaactgggacgcgatgttcgccggcttcaaccgcggctacggcacctgggtgcagggtgaagtggcgggcaactactccggcccctacaacaccaacacctccgtgcaacacgtggcgctcaaggtcaagccactggagaacctcatcctgggtgcgctgttcttcgactacaccaccgtcagcacccgcggccagccgaatctggacggtcgcgagctggacctgtacgccgagtgggcggtgaacgagcacctgatcatcacgccgctgctgggcctctacaaacccgacaaggatgccgaaaccggcggcaaccaggtcggtggcaacggcaccaatgtctacagtcagttggtggtcgccgtaccgttctgaaccgtctcgggcgcgcagggacgcagcgcctggacctcggcataagcgccctggtgatacaacagcggcgcacgcccgaaatcgtcgaaggccaccaccttgccgatcatgatccagtggtcgccaccgtccacctgctggtatttctcacagtggaagcgtgccgagcaatcggcgaacaccggtgaaccgccctcccccggttcgtactcgatcagcgcgaagcggtcttcgcgtgggcgcgcaaagttgttggacaggtgcacctgatccgccgccagcacatttaccgcaaagtggctggcctcctcgaacacttcgtggctgttggagcgtttgtcgatactccacagcaccagcggtgggtcgagggacaccgagttgaaactgttggcggtcacgcccaccttgcgcccggacgcggtagcggcggtgaccacggtcacgccagtggcgaagttgcccagggcacgacgaaaggcccgtgggtcgaaaaggctgttgtcaggcatgcaagactcccgggcgccctcgaacggacgccctgattgttgtagtggaagaacgggtcacaccatgctcgggtccggctccaggcccatcagctcacggccgaggatctgcgcgcagacgtcgtagtcggtgtaggcatgggcgccggtcatatgcgaatcgcggaacaggcgctgcatttcgttgtgttcgaaccaggcattgccaccggctgcggcgaacaggcggtccaccgcctcgatgcacatcttggtggcgtaggcctggttggtgcgccagaacgccagggtttcgcggctcgggtaacgctgggcggcgctgtgttcggcgtggtcctgccaggttttttcgaggaatgcgcgggcagcggccacctggtgggtggactcggccaggcgcatcaacgccggcgttgccgcgcccacggcagcaccagtgtaggcgcgcacgcgggttctggttttttcgcggaacacctccagcatgcgctcggccacgcccaggctgacggtggaaaaaccactggcgaaatacggccggtatggcgcgtagaaaatctggctgtcggggtagaggccaaaacctgcggacttgccctgcatcatgtccctggccttctggatccggtgctcgggcacccaggcattgtcgatgaccagagtcttggtgccgctgcctttcatgccggcggcgaaccagtcatcgcggatctggtagtcactgcgcggcagcacggcaaagcagtaatcctgggtgccttcggcattctgtcgacggcagccgacaatcgcccattcgccgtgatcacagccgctgctccagcccatttcaccgctgaagtgcacaccgccttcgccctccaccacgcgcccgaacggcgcaatactgctgctggcggtggcatccgggttttcgccccagatttcctgctgcaaccgggccgaaaacagcgccagttggtggctgtgggtgcacagcaagctcatggcccaggcggtactggcacagctgccggcgagcaaggcgatgcagtcggcgaactcgggcagcgacagttccaggccaccaaaggccttgggttgaaaggcacggtgcaggccgatgcttttgagcaaggcgatgttctcatccggcacctggcgttgctgttcggcacgcgtggcattcgccgcgatcagcggcaggaggggcttgaggtcttcgaggagtgggtttggctttttcatggacggccccgcttattattggaagtccggcagccgctccaagtcgaggagcagcgctggatgcagggccagtatcgaacggcgcgggccggtggaaaatgcacgttccacaggcaagattgtacttttcacaggcgcggcagccacaggcatgacgcctggcaggcacagtcaagccagacgcgggtggcttgattaccctcggcttttcttttgtgaactgccaggaacctgccatgagtgatatcccgctgctgcctcacgtcgaagcgtttttacgtcgaccccatgggctgttcatcgacggcgtcaacgtccgcagccattccagccagacgctggcggtgaccaatccggccaccggtgaggtgatcgcccaggtcgccgatgccgacctggcggatatcgatgcagccgtcgactccgccaaccggggcttccagttgtggtcccaggctgcgccggcgacacgcggcaatgtgctgctcaagctcgccgacctgctggaacgcaaccgcgaagaactggcgcagatcgagacctgccagtccggcaagatcatccagattgcccgtgcgttcgaggtcgaccaggccgcgcatttcctgcgttactacgcaggctgggcgaccaagatcagcggccagacgctcaccccgtcgctgccctcgttcaatggcgaacgctacaccgcgttcaccctgcgcgaaccggtgggcgtggtggtgggcatcgtgccgtggaatttctcgaccatgatcgccatctggaaactcgcctcggcactggtgaccggctgcagcatcatcatcaagcccagcgaattcacgccgctgacgatcctgcgcatcgccgaactggccatcgaagccgggttgccagcgggtgtgctcaacgtgttgacgggcggcggccacgtcggcaaaggcctggtggaacaccccggcacgcacaaggtgtccttcaccggttcggtgcccaccggcatcgccgtaggccgcagtgccatgggcgccggcctcacccgcgcgaccctggaactgggcggcaagaacgccgccggcttcctgcgtgacgtggacgtggacaaggcggtggacggcatcatcgaagccggttttttgcattccgggcaaatctgcgcggcggccgaacgtttcttcgtgcaccgctcgcagatagacgcggtgctcgacaaactcagccagcgcctcagccgcctcaccatcggctcgccgctggacgaacgcaccgaattcggcccggtcacccaccatcagcatcaactcaaactgctcggctacttcagccaggcccgcgccgaaaacaaccggatcatccacggcggcaaactcatcgaccgccccggctgctacgtcgaacccacggtgatcctcgccaacagcatcaacgacaccctgctcaacgaagaaaccttcggcccgatcgcgaccttcctgccctacgacagtgaagacgagctgctcgcgctgatgaacaacggcccctacggcctcagcgccagcctgtggaccaatgacttgggcaaggccctgcgcatggtgccggcgatcaaggccggcacgttgtgggtgaacatgcacacactgctcgacccggcagtgccgtttgggggcaatcggtcttcgggggttgggcgggagtttggcagtgcattcatcgaggattacaccgagctcaagtcggtaatgattcggtactgagggtcagccctttcaaggtctttgaaaaaccggccatatctggctgataccctcccaatagggcggacactgcaactgtggcgagcgggcttgccccgcgttgggnnnnnnnnnnnnnnnnnnnnnnnnnnnnnnnnnnnnnnnnnnnnnnnnnnnnnnnnnnnnnnnnnnnnnnnnnnnnnncccaacgcggggcaagcccgctcgccacagaaagcccactcaccacaagaggcccgcctgccgatccccctaattggatttacgcctgcgcaatcaccgcctccgcctcgatctcaatcaaccaatccggcaacgacaacccgctgacgataatccacgaagacggcggcgggttgtgcgggaagcgctcgcgcagcgcttgcgcgatcggctcctgctggtcacgggcggactcgacgatgtacagccgcaacatgatcacgtgagacaggtcaccgccggcctcggccagcaccttttcgatgttgtccaaagcggcggcggtctgttgcgcaatacccgggccgacggtgcgctcgtcagcatccacaccgacctggccggacagcatgatgcgccggccttgcggcacttccatggcctggctgaagccgtattgcagggcgttgaataccgttgtgggattaatgaccttccgttgcatgacacttccttgttgtttgtaggaaaacaaggctaacccaaagcaatcgttcaatccggcggttcaacatcccgcaacatatcggggatcgtcgaggggtgggacagactaccaactccccatcgccagactgaacggcgaaaactccgcgaactgccaccgcaacgccaacgccgccgggcgccgtacgacatgttccacggtgaccgtccacaagcgctgggcgccctcgaacagcgccacttcagggccatcgaggatcagtgaagtacgcccagccacctgcagcacatcccccgattcaaaatcgataaacaacaaccccgccaccgggttcacctgcaaattacccaaggtgttgaagaacaggttgccggcaaagtcagggatggtcagcacgttgccttcgacccgtacaaaacccgtattgccgccgcgatgggaaacgtccaccgagcgctggccatccacctcgacatagctggcgacgaagaaggtatcggcgttgcggattgccgcttgggccgcctcatccaggctgctggaacgttcggccacgctaccgggtttacgtgcgacggcatccatcggccgcagttgaatgtacttggggcaattgccgaacgtgtgcgccacgtcgaccgaaaagccctcgtgatcgagcacaccgatacgcccattcatacggttgcgacggcgggtgttgaggtcgatgcccagcaagccaatggatgcgccttcacgcaaggcattgcgggcagggtcgctcgcggatggcaagctatcaacctgcaaggtctgtgggtccggcgagtgggcaaagcccggcgcaccttcaagcatcgtcgcccagggaataccttgctcgtccaccacacccagcatcaggtacggcaacaaggggtagaaatcccgatgctgctcgggcaaatggtcacggatcaccttgggcccgaccacggccattcgctcggcgacgcccacagcttcttgcatgtgccgttcaccggcatgccagggggattgttcgatcaggttcatggcaagcacctcatgttggataacccgatgctgcgccctgcccgccaccgagggaatcaccacgccaggcaatccactgttacgccagctgaaatgccgggtgttcacgcagcgccgccacgcagtggtcgacaaagctgcgcacgcgcatcggtgcgttgcggccttggcgatacaccacgtgcacgggcaatggcggctgttcaaaacccggcaacaggcggcgcaattgtccattctgcagatgctcgtgaaccgggtaactcaggcagcgaatcacccccgcgccatgcaccgcggcattgatcgcgccctgcaccgtggcgcagccaaggcgcgcacgggccttgagttgataaccctggaaatcccaatgcacctgatcggcactggcaatcagccgatgctgcttgaggtcgtgcgggcgttggggctcgccatgaacagcgagatagtcggggctggcgcaaagaatattccgcacctgccccacgggccgggcgatcaatgatgagtcgggcagttcaccgacgaggatcgccacgtccagcccttcttcgtgcaggtttggataatagtcgtggtaatgcgccgcgaggctcacctcgggataacggtccaggtagtcggccaacaccggcgccatcacataacggctgaacaaaaagggcagaaacacccgcaggttgccctgggcctgcacatgcaagcctttggccgaggcttcggcggcgtccacggcggcgagcaggcgcacgcaatcggccaggtacgcgttgccggcgtctgtcaggttcacgccgcgcgtgctgcgctcaagcaaccgcacgcgtagccgcgcttccaggcgggcaaccgcacggaccagggttggtccggacacctgcacactgcgcgccgcgccggccaggctcgagtgcccggccagtgcggcgaacagttgcatgtcgcgatagcgctccatcaaccgcgccgtttcatcgccgggttcagggcggcgtcctggcccaggcgatggctgaggaagtcgacaaaggtgttgaccttggccggcacgcggccgcttttctggaacaccacctggatcggtaacggctcagcctcatacgcttgaaggacgatctccaactcgcccgccgccaccgccgtggcgacctgataggacagcacccgcgtcatgccccagcccaggcgtgccaggttgatcgcggcattgtttgccgtaacgaccaggcgcggctcgatgggcacggtcaagggttggccggcgtcgacaaactcccagccactcaccagttggctcgacgatgacgtgacgatcttggcctcacgcaactgcgacggatgctccggtcgcccgtgctggtcgagataggctggcgctgcacagacgacccggcgcacttcaccgaccttgatcgcctgctggcccggctcgtgcagatgaccgatacgcacggctacatcgacgccttcgtcgaccaggttgaccacgcggtcgaccagcaacgcattgatgttcaccaacggaaagcggtccaggtattcccccagcaccggcgccacatacaactcgccgaacagcaccggcgcggtgaccgtcaggtggccgcaggggatggagtaactgcccgccgccgcttcttcggcttcatcgagttccgccaggatgcgccggcaatcttccaggtaacgctggccggcttcggtcaggtgcaagctacgggtggtgcgcgccagcagttgggtaccgatgcgttcctccatggcggcaatggcccgcgtgacgctgggcggcgaggtgttcaggcggcgcgcggcggcggcaaagccctcctcctcggccaccgccaggaacacctgcatttcatgaaatcggtccatcggcactcctctcaagcaactgcatattgctattcccctgtggcgagcgagcttgcctcgcgttgggctgcgaagcagccccaataaggccgctgcgttgtttcagaaaatacgcggtggcaggtttcagggccgcttcgcgccccaacgcgaggcaagctcgctcgccacaacaagggttcacgttaatgggattgcaagcccacggctgtgcgtggcatgccgacgaaccccggcaacgcttcaatgctggcaagccaggcgcgcacctgagggtagtcggccagcgacacattgccttcgggcgcatgggccacgtaggtgtagaacgcaatatcggcaatagaaggctgctcgccggccaggaaacggctctggctcagttgtgcctccaccagcttcaacagggcatgggaacgagcaatggcggcgacggtatcgacctcggcaccaaacacggtggcgagccgcgcggacgcaggcccggcgctcagttgaccggcggcagccgagagccagcgctgtacccgcgcctgtcccacaggatcgcccggcagccattggcccttgccgtaggtgttggccaggtaaaccagaatcgcattggagtcggccagcaccacaccgttgtcatcgatcgccggcacctggccgaagctgttgatcgtggccagatagtcggcggtcttgtgggcaccttgcttgaggtccaccaggttgtattccaccggcaagcccagcagggacagcatcagttccacgcggtgggagtggccggacaacggaaaaccatagagtttgatcatgaaaggctccaaaagaagggggtctcgacgccccgcatactccaccgctgccccggccgttggaatcaccaggatttacaatcgagcatttcatccgatgaaacaataccgctcagcgctcctcgagcctgtccctcaggaaccgatgactcaccgaaaacaaccgccgataggtcagcagcaccgcccccaccgtgcccaacgccgacgacgcggcaatcaggaacatgatcccgatctggtaccgcaccgcgtccaccgggctctcccccgccagcacctgcccggtcatcatgccgggcaggctgacgatgccgaccaccgtcatctggttcagcgtcgggatcatccccgcacgcaccgcctggcggatggcttcctgcgcggcctcccagcgtgaaccgccgagggccaggatcatttcgatggtgttgcgccccgaggtcagttcctgggtcatgcgttcgatgcccagggagacgccggtcaaggtgttgccgaggatcatgccgaggatcgggatcgcgtactgcggctcgtaccaggggtggatgcggatcaccgcaaacaagcccacggcggtgaccagccacgaactgccccacaccgacaggatgctgtcgacccgctggccccggtaagtctgccgcccacgcccggcagcggagaggcccgcgatcagggtcatggcgcacatcagcggcagcaccacgtaccagtaggcgaactcgaacacccagcccagcaggtaaccgatggccagcagttgcaccacggtgcgcaccgccgcccacagcaattggcggcccaggcccaggcgcaacagcagcgacagcgcgccattgatcaggatcagcgaggcggcaatgcccatgtccagcgcggtgaggttctggtaattcatggctgggacgctccgctcaacacaccggcactcatctgcaaatggaggtcactcatgcgccgggcctggtccaggtcatgggagacccagatgcaggcacgggtgcgatcactggcaaaccaggcgtcgatcagcgcttccacttcgcgggatgaggtgggatcgagggcggcggtgggttcatcgagcaacagcacttcggggttcagttgcagggtgcggatcagcgaaaccacctgggactcgccgcccgacaggtcggcggcgcgtttggccagaaagtccggcgtcttgccggcgtggcccagcagtgtggtcactgtcgccagatcgaagctgcgcttgcgcgaggtgttgaggctgaaggggaagcgcaggttgtcctccacggtgccgtcgagcagcgccgggcgttgggacaggtagctgatatggcagcggtagtggggaatctgcgcgttgccgatcggctggccgttccacaggacctgcccggaggtgggcgcatccagcagcgccagtgcgcgcaggaacacacttttgccggagccggatgagccggtgatcgacacgcggtcgccggcctgcaggctgaaatcggtgggctggagcaacggcacctggcggcgctcgtccaggcgcgtgagggcgcgggtttcgattaacggggtgtcggtcatgaactcattactcggttgaacggcttgcaatcaaaaacctcactgcctatattccctgcctggcgctctctacgccaccttccgcggaaagggctgcgcccaggacactgcaacatcctcttttttctacgactccccaccttgaagcggaaaaggtttgtgcaaggagatcgtatgtcccaacccttcaacaccgatggccgtctcaaccttgagcaacagcgcaagcgcgccaaggaactgctgccgcgcctcaaagcccaagacccgaacgctaccttgtcccaggcccaatgggaaatcgccaagcagctgggcttcagcagttggccaaagctcaaggcccatgtcgatgccatcgacttcgccacccgccaccccgattttgccgccagcgatgaagcccgcaccacccactggcgctgcggcaatgacattgcccacagcctgcaactggcggggttcaaaggtcagttccggatgctcaccgacccgctgtgcatggggccggtccgcaatctgccccgccaagccttccgcgccctgcgcagcgcttttatcagccaggcctttgccattgatgcagccgatgcagctcgtcgcgtcgacgccgaatacgaccacctcgaagcattggccagcgccgaccacagtgtgctgtggtgcgaagcggatgcctatgaccaactgttcctgatccgcgcactcgccggccttgaacaggtgccgcgcaaactggagctcatcgaggtggaccgcattcctggcgtgcagcgctttatcggcatcggccaactggcgccggatgtattggcgtggctgtggccgcagcggcgcttgatcggggatgatgcggtgcaattggccaaacaggcctggtcggcgtattgcgacagctcacccgtccaatgggcgcaactggcccacgacaaccaccccgccttgccgttgcttgccccggcgttgttgcgccaattacaggaactgcccggtctgcatgacggcctttcgttgaccgagcgcctggccctgacgtacctggccgagaacgggccaacgccgtttggtcgggtgtttgccgaactgatggccaagcgtgaaccgctgccgtttctgggcgacatgatgtttcatgcgctgttgcaaccgctgctcgatggcgacaagcctttactcacggccaccgagacgcacctggaatggccgcgccaggtgctggcgttgactgcgctggggcaagccgtgctgaacggtcacgccaactggctggatcacgccagccatgtgcgatgggtgggtggggtatgcctgcgacctcgccaaccccactgggcgattgatgagcacatcatgccggtctggcgcccgtgattacgctaacgtgctgcccattcaaccttcacttgcgagactgcccatgcgcaacctgatcttcgccagcctgcttctgctggcgggctgccaacaaacgccgccggccaatgaccaactcgatgccgtgctctggacccagacctctatcgagcatgagttgatttaccgacagcttttcgccaatgccacccgccaacttgacgtggcgttggccgatcccacctgggatgccctgccctttgcgccacgcaacctgaacgggttgccgccggcggtggtggtcgatatcgacgaaaccttgctggacaacgtgccgctcaacgcccgcgacgtggtcaacaaccaagtctattcctacgaccgctggaacacctgggtcgaccaggccaaggcccaggccttacccggtgccgtggcgttcctgcaagcggcccggcaaaaaggcatcaaggtctattacctgaccaaccgcgaacacagccaggtcgccgccacggtgaagaacctgcgcctgcgcggtttcccaatcgaaagcgacgaacaggtcctggccgccagcccccccaccggtcactgcgaaagcgccggctacggcaagaactgccgccgccaatgggtcgccgcccatgcccgcgtgttattgatggccggggattccctgggggatttcgtgcaggccgaccacaacaccctcgcggatcagcgcaaggcggtggagccctatatgcactggttgggccagcgctggttcttgttgcccaacccgacctatggcaactggtacagcgcgccgtatggggatgatgagaagttgccgttcgagcaaaagcgcaagctcaagcaacaggcgttgcagttgcaggagtaatccgccttggctggcccaccgtgcttgacgccatcggcccacatctgattgacacaacaaggtcatatggaaatgaaacgagtacttatcgcatcgctcggcgctctatcgctgctccaaccgtcattctcttcagcggatatcaccaacgggaaaaccctcttcacccagcggtgtgcgatgtgccatggcgccgatatcagaggtacaggccccctggccaacaagagcaatcccccgacacctgacctgaccaccgccacgttcaaaaaacgcctgaatgactacccaggcgttatcgtctcttcaatcatccttcgccccaatggcgacctgatcccgaggacgttgcgagagaacggcgtgaagctagcgccattcgcgtggagggttagcgacttccgcgatttgaatcaatacatgagcggtgtgattgccaagacgcgttgagtctcacagcgttcttgcagcgatcgcctccacttcaaccaacgcaccgggcaatggcaacgccaccacttgcaacgccgtacgcgccggtttattcggctgttccggtgtgccaaagaactgcgtataccccgcctgcaaaccggcgaagtccagcccgtcaccggcgaagtacacccggccgtggccgatgttggtcaccgaggtgccgctggtgtcggccttgaggaccacgttgatcaccccggcgatggcatccgagccgtattgggcggcgacaccgggctgctggtgagggtacgccgctcggggtaggctgttgagctcaaacataacggaatgggttttgaaaacatgatgctatttcggcataatataatattctttgatttaattatttattgattttgttattcatttaagtaatgtttttttgtgatctggggattgggggtatatccgttatttgggtaacggcggatattggttccgcccttacggcggctcacttttgaagagccggaatgccggcccagtcaaaagtaagcaaaacgctcttgccccaacactcggcacctcgcttaggctcggtgtgcccgtaatccgacagggatttgggggggcgcctaagatcaaaatcaaaagcagatcaaaagccagagccagagcaaaccacccttcaactgatacatgaagatcaaactgtgggagggggcttgcccccgatggcggtgtgtcagccaactcatcagtgactgacccactgcaatcgggggcaagccccctccca

SEQ ID NO: 119 - DNA, 340918 bp, Pseudomonas nodulensis
  misc_feature (116963)..(117011): n is a, c, g, or t
  misc_feature (277805)..(277843): n is a, c, g, or t
aatccggtcggctctaaggccgccgcgctcttgatcttgatctggggcgccccgtcaaacacgctggccgaacgcaggcttgaatccgtgggtaacccggcaggacgccgggttagccgccccgcgccatggatggcgcgtggcggcggcccacggattcaagccggagtgagggcacaccgagcctaagcgaggtgccgagtgttggggcgaaggccttttgcttacttttggctgggccggcttccggcctttccaaaagtgagccgctgtaagagcggaaccataagtagccgttaccgaagaaacggatatgtacacttacctacctacctacccggccgcaacaaccgcatctgctgccgataatcatccgtcacctgccgcgcctgcccactactggtaatcaccctgggcgtaatcaacacaatcaactccgtccgatccttggacttgctggtactcccaaacaaccagcgcaaccccgggatctttcccagatacggtacggcactgacactctccccgttgtcctgcttgatcaacccccccagcaacaccgtctgcccactctgcaccgccacctgcgtcgacaccgaacgcgtcgaaatacgcggattcaccggcgtatcgctggtaccactctggctctcggcatcactgacctgctgctggatatccatgtacaccaacccccccggattgatccgcggcaccacatccaggatcaccccggtctgcacatactcgacactgctcaaggtggtgtccgcatccccggtgttgacggtggtctggctgatgggaatgttgtcgcccacctgaatctgtgccggctggttgttcatcaccaccagcgacggcgccgacagcacctgggtgcgcccattggtttccagcgcatgcaacgccacctgcaggttcgagctgacaaacgaatagaacaacgaatccgtcgcccccagccccgccccaccaccgcccagcgcgccctggctgccggaggcattggccaccgtggtgctgccagaattgcccgccaggcggcccaagtaccactgcacccccaggtccagctcaccggtgagcttgacctcaagaatccgtgtctcgatctgcacttgcagcggtgggttgtcgaggcgcttgatcgccgcttcgatctctttccactgcgcaggacgggtgcgcaccaacagttggttgctgctcttttgcgcggtgatacgggtgccggcctccagggcgttggtggcagcgaccggctgctcttccggctcgggttcttcaacggcaggagggttgttctgcaagccaccggtattgagtgacgacagggtcgtcgtgcgcaaccccggcgcgaccttggccggcgtgtcgtccttgatcgcgccggtgccgtagatctgccgcaggtacttggccaggtcgacggccttcatgttgcgcacgtcgtagacgtacatctgtggctcgttgccgccgccctcgtcgatggtgcggatccagtcgccgacttcgctgaggtactggggctgggaagaaatcgccaccaccgagttggtccgttcaatcggcaggaagcgcagcatgcccgccaggggcatgccgctgtcagggccgaacaggctttgcaactgaggcatcagctcggccaccgacgcgcgttgcaggccgaacacacccaccgacatgcccttgagccagtcgacgtcgaaggtgtcaatggtgtcctggtagttggccagttcatccggcgtgccggccaggctcagcacattgcgcgccgggtcgaccagcagaaacgcgttctcgcgggcgaagggcttgagcagtttctgcatctcggtggcggagatgtagcgcagcggaaacagccgcgccgacaagccgctggaaggttgcgccacgctcatctgcggcaccagcttgcccgccaccgcctggctggctggcaggatcacgtagcggtcgccctgcttgatcattgcgttgtcggtccaggacagcagggtttcgaggatcgacaaggcctgctgcttgtccaccggcctggaggtggaaaagctgacgttgcccttcacaccctgggcgatgctgtagttctcgtgcaacaggtcgcccatcacgctgttgatcaccgcttcgatgggttggtcggcgaagttgaacacgatgtcgccgccctctgccttcgcacccggcgtggccgccggcgcacgcacgaactgttggttgccccggatcaactggcgctgcgcgggagacttgaccaagggctgggcaacttccgttgggggcgcctcgctgggtgggcgttgcgcgccggtgccctgcatggcctcgtgcagaagctcatcatccggttcgagacggtcgggaaagctgccacagccgcccagggcaagggcggtggccaggcataacgtggaggtgcgcatgtcgatcaagggaggggctcgcggggcaaagtaagggggggtcgcttggacggtggcggcaagcgcttggcgtagaagctcaaggtctgggtgcgaccgtccaggctgaaacgggcggattgcggagtgaggtgttccaggcgccagccgttgggcagggtctggcccaggcgcacggtcagcagcgggccgtcgacctgcttgagcatggccatctgcaggttgccggtgatcatgatgccgctgagggtgagatgggccaggctgctgacctgcgccttgcccaccacacgatccgggctgcgatccgggctgaacagcggcgcttgccacgtggcggccaggttgtccaacggcacactgggcagcccttttacttgaggagtgggatgggcgcgcacaggcgcttcgggcagccattgcggttcatcacccaggctgctgaggatcaccgccatcagcacgcccagcaaccccgacaggccgagcaagccccactccacggggcgcaaccggctcatcatggcgtcacccgcgacggttgcaggtagccgcgcaccagcaggtgcaccaccagcttgcccgcaccaccactggccggcgcctgctggctgcggcggatgcgcagctcatccacaaacaggaacggcggttggtattcgagctcatgcagcagcgcttccaggggctcgatggcgcaatcgagtgtgaggctgaccttgacctggcgatacggctcgccgtcgtcctgctccggggtgatgggcttgcgttggctcaggctgcacccgccgccgaggttggcgtggctgttgatcaggtcggcgaggcgttgcatcagatcggcggcgaccacatccgggtcgtcccccggcagcaggctggtgctgctggccgggtcctgccgcgcctgctcaagttgctggcgcaagccatcgcgttggcgcagtacaccggcatagcgttgttgttgctcgcgcagttgttcggcctgttcacccatgtcacgcaagggtccggcaaaccagctgtcgaccaacagccagtaagccgcgccgaccaccacggccagcagcaacaaggccgcgccgcgacggtcacggggtgtgaggggtcggcgcatcggcagcctcctggcgtaggtgggcgcgcagggcaaactggtccttgccggtgcgcgcatcgggttggatcaccccttcgaactgggcgttttccagactgcggcaacccttgatgcgagtgatcagcgcactggccttggcgctctggccggcgatggaaatctcgccgtccttcacgtccagttgatccagccaggtgtcggcgggcaggcaggtggtcaggtcgttgagcaacgctgccagtggcggttgcgccagtttgcgccgggtgaggtactgcgccgcgccgcgggtattgagcagttgctggcgcagcgcatgcacctcggcgacctcggctttttgctgttggacgctggcgtgcataacgtcgataacgcgctggcggtcgttgagccacagcagcatcgccgcgatcagcaacgccccgcacagccacggcaggctgcgttgcaagcccatgccggcgggccgctgcgggcgcaatggcgcgggcagcaggtcgacgccgaggtccgccgcatccacgcgatggggatgcaggcccagggtggcgcagtcggcgaggatctggtccaggcgttcgcgcaggatcgccaccaacgtcacctcaaggtgggtggaagtacgtcgctcctgacgcgccacaaagtagagttggtcggcctcgaacggggtgtagcggtccagctcgtagccgaccacggcgctgagattgcgccccgccgccaagggcagttgcacgctttgcaccagcacagcgtcggcgccgagcatcagcacctggcgcgtgttggccgctgcgaccggcgcgctcagtggccagtggtggatctgctcgggtggctcttgccacgccagccacgcgggtacacaggcgcgcaactccacgatccatgcgtgccacccctgttgcagcaggctgccgcgccagtgtcgggcgatgggttccagtcgattcattcttgccaacgcaacacccggtagggttgtgcgctgtcctccgatgggctcaataaaacggtgacttgcaggcgcgcctgataaccgccgggccgctcggcgcggctgtcgaccaccagtacctcgccggggtccacgccttcggcgttctggcgcggcaggttcagcgccttgcgcatcagcgggctggcgaaggcgggatcggggcggtccaggtcgctccacaaggtgatctcgggcagcaagcggctgtagagggtttgcgtcatgccgggcaattggcgtacttcttccagcacccgcaacggcgccaggccctggttacgtcgtgcttcgagggccgtggccagttgtgtggcctgggccggggtagcgccacaggccagggccaggcgcgtgaagtcctgggcatcagcgttgatcaggtagagcttgccgcgctcgctgcgcaggctcacgtgcaattgggcgtcgtcaaaggccagggggatgtcgcgaccatcggcaacccagtgccgatcggccatgacctgcgcgataccggcttcggcggccaacacggtctgggtgtgctggcgcagccacagggcctggcgactttccagctgtacccagccggccaggccgccgagcaacacgctgagcaacgccagtacccacagcaccagtagcaacgcagcaccacgttggcgcttcattcttcaacactcccgctggacaggttcaagcgcaaggcaatcacctgggtgacccagggcaccggccccgccacgctggcagcgatgcgcacggccgaaggcaagcgcctgggccagggccattcactcacccagccggtgggctggcccagcggtgactcgccgcgataactgaactgcaacgcctcgatgttgttcagcagcacctggggttcacgttgagaaaaccccacctgcaacgcctgttcgacccgttgcaggctgaaccgatggatcccgccaccaagcacaccaggcaaggtcgagacaaattccagacgctgcgccgtgcccacgaaaaaaccatcgccctcgcccaccgccagcggcaacgcctcgctgatcgccgtgcgcaaaaactgttgggcggcgcgcacttcatccaggctcaccgtgtacgcctgggccttggacacggcgcgattggcccccagcaatgcgccgccgaccagcaccagcaaaacgccgagcaagctgagcaccacaaggatctccagcaaagtgaaaccctgctcgcggcgcttcacaggcgcgccttcaaggtgctgaagcgggcctggtgcgagccttcgctgaggaccaggtcaagacgcacgatccgcgcttgctgccgggtgctgatcagttgccaatggatgccgtcgagttcgccctggctgacgccgttgctcaagcgccccgccgcttcctggtcgaaaatcgtcagcgccgcgtgggtcagccggtcactgtgggccacctgggacaacgagcgcgcactctggccaaaggcaaccagcagcaccgtgctgcacaccgccatcagcgtgagggcggcgagcatttccagcagggtgaaaccggcctggcgcttcatggcagcgccttggcttgcacgctgccggtgagccagccgatatcgatgcgccaacgccgggcaccattggccacgaggagattgccgccggtggaactgccgtcggggtagaactcgacaccagggccgacctgttcggcggtgtgcagcgtcacatgcaactcggacggccaccgttgcaccgctcgccccggcgcctggaacgtacggtcgctcagatcgaacacggtacgcgcaggctgcccactgacaatcgcccctgcccgcgtggtgcgcagcgcctccaccatctgccccaccgcatggcgttcctttgccacctgcaagccctggcgcacacccagccccagcacgctggcagccaggctgatcagcaggatcaccaccagcatttccagcagggtgaagccgcgctggagcatggcggccctactcccaattgcccaggtcggcactgtagccttcgccgcccggctggccgtcctggccatagaagatcaggtcgaacgcgccgtgttcgccaggaaagcgataaccgaaggcgtgcccgaacgggtccttgaggtccgacggcttggcatagccaccgggcctgtccaccagctgttgcaggctggtgggcggtgcgccgacgtcgagggcgtagctgtcgatcttcatgctcaggctggccaattgggccttgccggcgccgtacttgcccttgtccacattaccgccgacctggcgcacgacgatggtggcgacgatgcccagcagcacgatcaccgcgagcatttccaacagggtgaaaccgccttggcggcgtggttttttcatggggtcagctcctttatatattgctggtcaggctcgtcagcggcagcatgatcgccagcatgatcaccgccaccagcaccgccatgaccagggtcagggacggcaccagcgcggccagcaggcggtcgatgccgcgcttggcttcgacgtcgaagatgtcggcgaccttgagcaacatgccgtcgagttcgccggcctgttcgccgacttcaatcatttgcacggccagctcgggcagcagcggctggctgccaaacgcactggcgagggtgccgccggcttttaccgattccgccgcacgcccgacctgggcctgcaacgcatggttggtacagacttgccgcgcaatcaccaaggcctgcagcaacgccacgccattgctcagcagcgtgccgagggtacgggccaggcgtgccgcttcgacgcgttgcagcaacgggccgaccacacgaataccgagcagacgccggtcgtagcgctcgcgaaacagcggatcgcgcaggcgtgcggcccccaaccaaacgatcacgctcaacccggccaacagcgccaggccataggcgtcgagaaacgtcccgagggccaggatcacctcggtgatcagcggaatcggcacgcccaggtcctggaagatcggcacgaactgcggcaccacatacgccagcagcaacgccagggaacccagcacgcccaccaccaggaacgccgggtagatcagcgcattgatcacttcgccacgcagcaattggctgcgttccaggtaatcactgagttggcgcaacgtcccttccagcgcgccaccggcctcaccggcccgcaccatgctcaggtacaacgacgagaacgccggaccctcttcttccagcgcggcggacaacggcttgccggccttgacccggtcgcgcaggcgttcgatcaacgcgcgcacctggggtgggccgggctgcttgagcagcaggctcaacgagcgctcaagcggctgaccggcccccagcagcgtcgccaattgctgggtaaacctcaccaacgcctggcccttcaacggcccgcgtgccctgcgcaggccggggccgccggccggttcgatgtgcaacagcagccaaccgcgcttgtgcagggtcgccaccgcagcggtttgatcggtggcctccagcgtaccgttctgcggcgcgccctggctgtccagggcacggtagctgaacaggctcacgcgtcctctccacgggtcacgcgcagcacttcttccagcgaagtaatccccgccagtgcctggcgcaagccttcttcatacaaagtgcgcaaaccggcgcggcgtgcggcctgttccagggtcgaggcgtcggcgtggcgcatcagcaggctgcgcagttcgtcgttcatcaccagcagttcggtgagggcgctgcggccgtgatagtccccgcgatagagcaggatcgggcgttgttcggtgaggcggtccaggccgtgttcggcgatcagttcgggcggcgcttcgaaagcgacacgcgtggccgggtccaggcgccgcaccaggcgctgggcgaggatgccgctgacggtcgaggcaatcaggtagctttccacgcccatgtccagcagccgcgtgatgctggcggcggcgctgttggtgtgcagggtggaaagcactaggtgcccggtgagggacgattggatggcgatgcggcaggtttccaggtcacggatctcgccgatcatgatcacgtccgggtcctggcgcacgatggagcgcagcgccccggcgaagtccaggccgatggcgggcttgacctggatctggttgatgccttcgagctgatactccaccgggtcttccacggtgatgatcttgcgctcggcggtattgagccgcgacagcgcggtgtagagcgtggtggtcttgccggatccggtaggcccggtgaccagcaggatgccgtggggccgcgccagcaggtcgacaaaggcggccaagcgctggccgtcgaagcccaggctgggaaagtcgaactgcacggtttgccggtcgagcaggcgcagcaccaccgactcgccaaaactggtgggcaccgtggacacccgcaggtccagttccttgccctggatacgcaacatgatgcgcccatcctgcggcaaccggcgctcggcgatgtccagccgcgccatgatcttcacccgcgaaatcaccgccgccgacgaactggccggcggcgcttcggcgtcgtgtaacacaccgtcgatgcggtagcgcaccttgagctggtgttcgaaaggttcgatgtgaatatccgaagcacgttgctccaccgcgcgttgcaggatcaggttgaccaggcggatcaccggcgcttccgaggccaggtccttgaggtgttcgatatcgtccagggcaccaccttgttcatcgaggttttcgatcaacgtgcccatggccgaacggccctggccgtagtaacgctcgatcagcgtgtcgacctcagtgcgcgggccgatcgccagccacaccggcacctggcacgcataggccagagcctggaacggataacgcagcgccgggttggcggccagcacgcgcaggccaccctgggtccagcccatgggcgcgacctgatagtgacgcataaagcgttcagtcagggcgggcaaaggatcgagcaacggcggcgcggcgtcggccagcaacagcggcgcaccgagcaacgccgcccaggcacgggccaattcgatatcggaaaccaggcccaggcgggccagcaggcttagcaggtcatccgacggcaagcgccgggcgcgctccaggtccaccgttttcaacccggcatgctgcatcagccacgcacacacctggtcggtgtgcgggatctgcatctggcaggcatcaataggcgctgacgacataaggttgaggtatctagtattgcgaaaaagtatggctatttgaaactacttaaacatgccattagttagccataacccaagcgagaacaagccggggttatcgactggaagttatagcgctagttcctgaagagggggaataaaatagacacaatgaccgagaaccccgtgacagagccttagcagctaatagccactacttcgctagtttcaattagccacttatgcgctttcacgcaattaaatggcagcccaataaactcactggacttacttcaccttcgacgcggagcacactcgcactttcgagtggccgttaaccaggattatcgagcattgaaatgtgggagtgcgttggcatgcctgcgtgagtggtttgggggctgcttcgcagcccaacgcggggcaagcccgctcgccacagcaggcccgctcgccacaggaggccgggccggctacacagaacaaaaaccgtatccacgatgcgaagcgagtcggtcttgatcttgatcaggccttggcccgagtgcttttttcaaccaggcacatcggcgtgccagcgaccggctcttgcatcacctgcacctgcacctcaaatacccgccgcatcaactcggcactgaccacctgcgccggtgcgccatcagcgaccagtttgccgccgtgcatcaccgccaagtgatcggcataccggcaagcctggttgatgtcatgcagcacagtgatcaccgtcttgccctcggcagccagttcgcccatcaggtcgagcaattcgacctgatggctgatatcgagataagtggtaggttcgtcgagcaacaccaccggcgcattctgcgccaacaccatcgccagccaggcacgctggcgctggccgccggacaagtccgccagggcgcgatcagccaacacgtccagttccaggcgctgcatggcttggcttacgtgagcctgatcactgccgctcaagcgcccccacagcgagttatgcgggctgcgaccataggcaaccaactggcgcacgctgacgccttcgggcactggcaacacttgcggcaagaacgcgatctgccgtgccaactcccgggcagacaggctggcataggcctggccatccagggtcaactcgccctgggtcggattgaggatgcgcgcgaaggccttgagcaaggtggacttgccgcagccattggggccgatcaacgcggtgaccttgccggcaggcggtgcgaaggacagaccctgcacgatgcgcgtggcgccatagccgatgtccagctcgcgtgcctggagaatactcatgtcatcaacccttgaaccgtgccagcaaccaaagaaaatacggcgcgccgatcaccgccgtaagcaccccggcggggatttcgctgggcgcaatcagcgtgcgccccagcgtatcggcgagaaccagcagcaacgcgccgatcagcatcgcggccggcagcaggtactggtgatgcccgcccaccagccgccgcgccatgtgcggcgcgaccagcccgataaagccaatcggaccgatcacccccacgcccagactggtgagcaacaccgcgcaggccatcgccgaccaacgcgtacggctcagcgcggtgcccaggctgtgggccgcctcatcgcccaaggcgatcaggttgagcggtttggctaggcacaggcccacggggatcagcaccaggaacggcaacaccagcgccacatgatgccagttgcggctccacaggctgccggtcagcgcaagcaacgcggtgttgatatccaacggatgagaaaggatcagaaactcggtgacgctggacaaagtcaccgcaatcgccactccggacaacgcaaagcgcaccccggaaaaactcacgccggtgttgtacagcgccagcagcaacgcgccgccggccccgcccaggcaagccaccagcggcagccaggcaatcggcaactgcggccagccgatgatcgccacggtcagcgccaacccggcgccttgggtcacgccgaggatctccggcgaggccagcgggttgcggatcacgccctgcacaatcgccccggccaggccgaaggccgcacccgcgaggatcgcgatcaggctgcgcggcaggcggtggttccacacttcgaagtcgagggcgtcgtgggccagcaggcgttccagaacggtgtgcggcgtgagccacagcgtgccggcgctgaggctgaccccggttgccagcagcaacaggccaagcagcagccacaggcgcagtcgtgggcggatcatagggcgcgcctggcaagaaagaggaaaaatggtgcgccgatcaacgcggtgaccacccccgccggcgtttccaccgggaaggccacggcgcggctgagcaggtcggcccccagcacgattaccgcgcccaatgcggcgctcagcgggatcagccagcggtagtcattgcccaggaactgacgcaggatattcggcgcgatcagcccgacaaacccgatcggccccaccgcacacacgctggcgcccaccagcagcaaactggcgacaaacacttgcagacgcaggctggcgatgcccacgcccaacgagcgcgcggcgtcttcgccaaggttgatcaggttcagtcgcggcgcacaccagagtgcccacaggccgccgatcaaggtgcacggccagagcaactgcacctgcgcagcgccgacattggccagggagccggccagccagttgagtacactttgcgcctgggcctcgacgaggatcaccgtgagccgggtcaaggccgcgcacaacgccgccacggccacgccggccaataccaggcggccctgggccgtggtcggcgaccaggcaccgccgaggctgaacaccgtgatccaggccagcgcgccgcccaggcaggtcatcaacagcgcaccaccggcaaagggcagtgcgaccaggccggtggaaaacagcgccagtcccaatgcggcgcccgccgtcacaccaaacagggacggcgacgccagacgattgcgcgtaatgccctgcatcagcgcgccggcgaggcccaggcaggcgccgaccaacgcggcacacacggcccgtggcacgcgcaactgggcgacgatataggccatgttgccgccaacgctgccctggtgcaccaggccattccaggcatccgtcgccgtcagggtgaagggtgaccagctgtacagcgacagccagaacaacacggcacccaacagcagaatgccaatggcggcgaaactgcgttgcacggttattggctcaatacggctttgccgcctttaagaatcgccaacgcgtcctcggcgatctgctccgacgccagcacgccacggttgcgtgcccagctgtcgccatccacttcggccacgtgctgattgcgcacggcgccgagcacttgccacaacggctgcttgctccagctgtcgacgatgctggggcgacggtaatgaccgaccagcaaccaacccgggtcgagggccagcaattgttccaggctgacgaactcggtgggtgcggcattggcgcgtaccgctgggactttcaggccgatggcctcaagcacgctgccggcgtaggagtccgggccatgcacggagaagctgtcctcacgcgccacaccgaacaacacgctggcgccggccgggatctgttgtgcaatggccttaaggttttcacggttcttctggatacgcgcctccatctgcgcactcttgccgagggccttgccgatcagctcggcggatttgaggctgccctggtaatcctcgccacgggacggcaacagcaaggtcggcgcgatgctcgccaggtcgctgtacagcgcctggtggcgattgagatcagcgacgatcaggtcgggcttgagccgggcgatttcctcgatgctcggctgcgaacgcaggcccaccgacttccactggccgatggcctggcgtacgcggggcaacacgcggttggcatcgccatcatcggcggcgccgaccggggtgacgtcaacggcggccaggctgtcgagaaaggaaaactccagcaccaccacgcgcttgggggcatcgggcagatgcacggcgtgctggccatcgttgaggtcgatgggggcggcgctcagcaggctggacgagaacgccaagacacaggcggccagggtggggatggaacgcagcattcgcatgacaaggacctcggcgttaacacaccccagctagacaggccggggaaaacggcgggtactattccatatcggggcggcgtgatcaaaaaacattctcatttatgacctgctcggccatgtggatgctggcttgctggagggggctggcttgtgtggtcactggtttgtgtggtgagcgggcttctgtggtgagcgggcttgccccgcgttgggtggcgaagccgccccaaaacctggcaccgcgttctacctggcacgatgtggtgttcttgttggggctgctgcgcagcccaacgcgggacaagcccgctcaccacaggaagcgcgctcaccacagcaagctcgatgtcagaagtcgacggtggccgacagcaggtaggtgcgcggcgtcgacagggtcagccccggctcgctgtcatccgatgcaccggccgagctccagtagcgtttatcggcgacgttctccacgttcgcccgcagggtgatgtgcttgtcatccaccttgaagccatagcgtgcgccgacgtcgaggcggttccaggcgtcgatttccttgacgttggactggtccaggtactgtgagctggagtagatgccacggctggtcaacgtcaggccttccaggcccggcacgtcccattcggcgccgaggttgacgttgtacttgggcgtcgccggcgcgcggttgccgtcccaggtgccattggtggtgtctttgagtgtgctgtcgatgtacatcaccccacccagcaggcggaagcccttgagtggctcgccgaacacgctcaactccacgccggagttctcacgcttgccattgggcccgaacagccgcgtggtcgcattggtttcataggccggctgcttgatgcgaaacacggcggcggtcaccgcgaaggcaccggcatcgtacttggcgcccacttccacctggcggctgatgaacggcgggaagatctcgtcttcgttcctcgacgtcgacggcgcgatcttgccctggctcaggccttccatgtagttggcgtacaacgacagcttgtcggtggccttgaacaggaggccgcccgacggcgaaagcttttcttcgtcataggcagtgtcgcctttgattccgtcgctccagtcagtcaccttgacccgctgccagcgcgcaccgagggtgagcaacaggcggtcgtcgaaaaagcccagggtgtcggacaaggccacgccactgaatttgttttcggtatagaccttgggatcgaagcgcgtcggccgtgacggcgtcgacgactgcaccgggttgtagagattgctcgacggcgccgtataccgcgcaccgccgttggtgaagtccatgtcgaagtagctggcggccaggttgacctcatggctcaccggcccggtgtggaaccagttgcgcacgccggcggtataggtgcgcacgttttcatcacgggtgaagtcccgcggctgcacgctgaaatcaccggccgcattggtcaccgaaaccgcgtggcgtaggaagtcgtggttgcttttgcgcgcgcccacgccaccgtagagcatcacgttgtcactgaggtcgtactcggcgttgaccgtaccaaaggtgtcattggtgcgagccttgctccacgactgcgcatagttgcggcgcacgtcgttggcactcgggaccggcgcagcggccgccacctgcacgcgctcctggggggcatcggtgtcgcgctcggtgtggccgatatcggtggaaaggcgcaggcgctcgccgcgaaaatccaggcccagcacggccatttcgcggtcgacgctctggtggtcccaggcggtgtcgccggattgcttcacgccgttgaagcgaatgccgtactggttgtcttcgccaaagcgtcggccaatgtccaccgcaccgccggcctggctgtcggaggcccagttgccggtaaacgagttgatgtccttgtcggtggcgcgcttgggcaccacgttgatcccgccgcccacgctgccccgcggcgaaatgccgttgatcaactggctcgggcctttgaggatatcgacgcggtcggccatttccatgtcgatggtgtacgtcggcagcacgccgtacaggccgttgtaggccacgtcactgttgaacaggctgaacccgcgaatggtgaattgctcgtagcgcccaccggccgggttagtggcgcgcaccgaggggtcggcggcgatcaggtcgccgagggtgcgcgcctgctggttcttcaccgcttcctgggtgtaggtggtgatgctgaacggggtctccatgaagtcccgcgtgccgagcatgccctgtgccgtgcggcgcgccacctggccaccggcgtaggtgtcgccgtcgtacaggccggtggtgccgaggatcgacgtgggtgccagctccaggctgctgccctccggcaccggcaccagcatgtaggcctgctcgcccatggcttgcagttgcaggccggagccttgcagcaggcgggcaaagccctcctccacaccgtattcgccggacaggccagtgctgctgcgcccgctgaccagcgccgggtccaccgacaggttgacccctgacaacccggcaaaacgcgtcaacgccgcgctcaggctgccggccggtacctggtaactgcggcgggtgctggtgtcttcggcgtagctgacggcggcgaaaaacgggctggcgctgaggctcagcatcaggctcagtttcagcaaggggcggactgcgggcattggcggaagctctcgatgttgttcacttgcctggaatgacaggcgagatgaaaaaaagggacagccttcagccaattttctttcttaccatactgcgatcgttgaatccgtccttggctccgttccgccgcacaatacaccactgaccggatcacgcaggatgatctggccgcgcccatagtcggtgaggtcgctggcgatctgcacctgatgcccgcgtcgcgccagggcattggccaggtcacgggaggcaccctgttcgatgccgaccttcatgtcgcccagccattgccagcgcggcgcgtccagggccgcttgcgggttgaggccgaagtccaccaggttcatcaccatctgcacatgaccctggggctgcatgtagccgcccatcacgccgaatgggccgagggcctgtccgtcctgggtgaggaagccggggatgatggtgtggaaggttttcttgcccggtgccagacagttggcgtggctcggatcgaggctgaattcctgcccacggttctgcagggcgatgccgctgtcgggcagcaccacaccggagccgaagccgtggtagttgctctggatgaacgagaccatattgccctcggcatccgccgtggccaggtacaccgtgccgctggcatgggggtcgccgggtttgggcggttgcgcctgttcgccgatctgcccacggcggcgggtgctgtaggcatcgctgagcaggtcggcgacggccacgcgcatgtgcagcgggtcggtgatgtagtgcaggccgtcgctgtaggcgagtttcattgcttccaactggcggtgccaggtctgctggctgtcgcggtgatcgaagctgaagccttcgaggattttcagcgccatcagcgccaccaggccctggccgctgggcgggatttcccagacgtccacaccccggtagttgatgtggatcgggtccacccattgggcgcgataatcctgcaggtcgctggcgcgcaggtagccgccactggccttggaatgggcatccaggcgttcggccagggcgccgcgatacaggctttcgcaacgggtcgcggcgagttcttccaaggtgcgcgcctgggccgggttgcggaatatctcaccggccagtggcgcgcggccgtcgatcaggaacgtgtcgaaccaggcgtccagggctgagtcgcgatgggggctgaattcgtccagcgcgacctgccatagctgggcgatcaccggcgacagcgggaagccgtcacgcgccaggctgatagcgggttgcagcaactcggcaaacggcaacttgccgaagcgctcggacagctcggcccaggccgatgggcagccgggcacggtgaccggcgtccagccatacagcggcatccggtcgtgccccgccgccttgaccgcctcgatactcaaggccgccggcgcgtggccgttgccattcaggccgtgcaaccgacccttgcaccagaccagcgcgaacgcatcgccgcccaggccacagccggtgggctctaccactgtgagcgcggccgccgtggcaatcgcggcgtcgatggcgttgccgccctgttgcatcatctggataccggcctgggccgccaggggctgggacgccgcaaccatgccgcgacgggcaaatacgctttggcgctgtgagggataggggtactcgtgagcagaaaatttcaacatggcaaaggctcttccacacaaggtttcgggtcataacacacggctgagaaacgctcgggtccgcgggtggctggggtggctgaagatctgttccggcggcccttgctcgatgagttcgccctggtcgagcaccaccacgcggtcggcgacttcacgggcaaagcccatttcgtgggtgaccaccaccatggtcatgccctcctcggccagctccttcatcacctgcagcacctcaccgacggtttccgggtcgagggcgctggtgggctcgtcgaacagcatggcctggggtttcatcgccagggcgcgggcaatcgccacgcgctgctgctggccgccggaaagcatcgacgggtagtggccggccttgtccgccaggccgacccgcgccagcaatccacgggcttgctccagggcttcggcgcgcggtgtgccaagcacctggatcggcgcttcgatgatgttttccagcgcggtcatgtgcgggaacaggttgaaacgctggaacaccatgccgatgtcgcggcgctgacgcgcgatgttgcgctccgaatcacgcaccaggctgccgtcgctgcgctcgcgatagcccatggcacgaccgttgacgcggatgcgcccgccctggatgtcttccagcaggttgatgcagcggataaaggtggtcttgcccgagccggaggcgccgatcagcaccaccacttcgccgcgccgcacttgcagggagatgcccttgaggatctgcagggtgccgaacgacttgtggatgtccagcgcctcgatgatcagttcttcactctggtgcgccatggttatcgtcccctcagcagtttcaaggtgctgcgcccgaacatgcggctggacgccggtggcggcgcggatggccggtcggactggccgaagcgcgcctccagccagcgctggaaaaagccccacagcgtggtaagcatcaagaagtaaatcgccacgaccaggtacaactcgaacacgcggaacgtcgccgaggtgaccatctgcgtgctgagcagcaactcctgcacgccgatcacgctgaccagggtggtgttcttgagcatcacgttgaactcattgcccagcggcggcacgatcacgcgaaacgcctggggcagcacgatgcgccgcatcagcttggcaaagcccatgcccagggaacgcccggcttcgtattggcccttgtccaccgcgccgatgccggcgcggatgatctcggccatgtatgcgccttcgttcaagcccagcgcgatgatcgccgcctgaatattgccggggatgaccaggccgaacagcgcgatatcctcgaagcggaaaatcccgcccgctgccaacgcggtgtacaggaatacgatctgcaccagcagcggcgtaccgcgcatcagccacacataaaaacgtaccggcaagtgcaacagcgggttcttcgacaagcgcagcagcgccgccgccaaccccagcacacagcccagcagcatcgccgacaccgcgatcaggcaggtcagccacagcccggtgaggtacaccccgctcggctgcaacaggtactgccagaacacatcccaattgaaattcatcgccggtgtgcctcagtcgagtgtgtcgctgctgacatgccacttgttcagcaactggacgtagctgccgtcgctgcgcatgtcgctgatcacttgctgcacggcggcgctgagttgcggatcatctttgcgcatgcccagaccggtgaggatgcggctgaacgctggcacgccttcctggaacagctccggggccatcgccgcgtaataaccggcggtttccacggtggtgccgtaggcatcaacctggctgatgcgcagggcctggaaggcgtcggtatcggtgttgtacaccaccagtttcatcggtgatttgccggccttggccaggctgtcgttctgcgcgtccagcagggtcttgatggtagagccgttgagcaccgcgaccttgtgcccggagagatcatccaggctcttgatgcccttggggttgcccttgggcaccaccaccgactggctggaatacatatagttgacgatgtcgatcacctggcgccgctcgggtttgtcgaacagttggtcgacgatcatgtcgcactgctgggcgagcagcgccggcaccaggccagagaacggaatcacccgccactgcacctgtttgtcgcccaggcgcttggcaatttcgaggcccagctcgacggtgagcccgcggggtttctgtgcttcatcgaaggacaccaggggcggtgaatccatccccgagcagtaggtgagtttgtcgacgttcttcagacgctccggcacctggggcgcggcgacggcccattgggtacagaggccgagggagacagccaccagcaaggcgcggtgtttatgcatgaccagacactccagttcgttgattaacggggcaggactcaacgtcaacacacagcaggtgtttcttattgttgttgttcgctttgcaggaactggatcagcgccggcacggtgccttcgatatgttcgcgcaccacggcttcggcgcgggcggcgtcaccggcacggatcgcgtcgagaatcaccgcgtgttcctggcgggcactgagaggtttttcgccgtgttgcaaccacaggcgcatcggcgcttcgaccagtgagtacagcgccgagatctgcttcatcaggcgcgggcggccactaaggctgcacaggtattcgtggaaggcacggtggcgactgacccaggcggcgctgtcatcacggtagtcgtccatcgcgtcgagcaagcgctccagcgcggccaactggcgctcgccgatgcgccccaccgctacgcgcaccgccaggccttcgagggcgctgcgcatttcgaacacttcgtgcagttcatcgatatccaggccgctgacgatggcaccgcgattgggccgcaagttcaccaggccctgggcgtccaggcggcgaaaggcttcgcgcaccggcatgcggctcatgccgatctcgctggcgatgtcttcggcgatcagacggtcgcctttgcggtaacgaccgccgcaaatggcatcgagcaggaagttgtaggcctcctcctcggcagtgaggggctggcggtcaacgtaagcgggggcaaattgcatcggcagcaccttttgaatttttgtatccaattatccatggatacgaaaaagcaggatgtgtgccaagtgaagtcatgatgagccaagcgcttgattcgaatgaaatagacccgttcgtcaccggaaaacatgaagcgatcgtgcagaagcccgctacctaaccgctcagaaaacgccccatcagtgggcagaagtaacaagcgagggcacgcccgggaatgcctcactcgcagacggcagctcactcatgcgtatgaccgccagtggacggccacacgcggccgctcactgtggccattgctcaagcagtatcgagacgaatttttccgccgcaggcgaaagcgatgagcctcggcggtagaccaagcccaaagaacggttaaccactggctcgatcaacgggacgctgaccaaggtgggatgatcatcagccggcatggccaggcttggcatcgccgaaacccccaggccggcctccaccaggcccaatgaagtcgaaaggtgctggacttcatagaaccattgcggccgccaactcaaacccgatagagcgtggtcgagcagcatgcggttgccgctcaaacgccctaccccgataaggcggtaatcgctcaattcagaccaggtgaccgaactgcgacctgccagctcgtgatcacgccggcacgccaatacaaagggctcactgaccaatggcacgaactcaatgtccggatgctgcccactcatcatgttgataccgaagtcggcttccccgcgcagtaccgcttcaaggccctcattcgcactcaaatccagcagacgtatgcggatttttggatagcgctcgttgtacagacggatcactgaaggcaggaaatagaacgcggcggtagggatacacgccagggttacacgaccgatctggcgttcggccagttcacggatattaagaatcgactcgtcgaagtcatccagcaaccggcgcgccttgggaagaaagtcacgcccgacgctggtaaggctgactttgcgggtggtgcgatccagcaacgccgtgcccagcccctcttccagtttttttatccgccggctgagtgcaggttgagacagatgcaaagcatcggccgcttcgtgaaagctacccaattcggcgattttcacgaaagatcggatgtcgtttagctcatagtccatgtccagtctcgtcagccaaggaaatagggaagtcgtttagcgcacttttatcattcgccaaacgcaataataacgtcaatttttgcattggaaacatttttcaaagcttgagactcttgctcccagagcatcaattacctcgattgatcaacaagagtcagtattatgcaaagaatcccctgtgtgctgatgcgcggtggtacctccaaaggtccggtttttctcgactgggatttgccgtcgtccatcgaggcccgcgacgaactgctactcaacctgatgggctccggtcatgaactggagatcgacggaatcggcggtggcagcccgcaaaccagcaaggttgcgattgtcagcccttcactgcacccggatgcggacgttgattacttgtttgtccaggtgatggtttcgcagcgcagagtcgacagcgcacctaattgcggcaacatgctgtgtgcggttggcccgttcgccatcgaacagggcctggtcaaagccacccccggacgcacccgtgtgcgcattcgcaacgtcaacaccgggaccttcatccattccgaggtgtacacaccggatggcaaagtcagttatgagggcgataccgccattgatggtgtgcccggcaccgcggcgccggtgcaactgaccttcctggatgcagccggcagcaagacgggcaaactctttcccaccggcaacacgcaggacgtcattgatggcattgcggtgacctgtatcgacatggccatgcccatggtgctcgtcgaagccagtcaactgggcaagcgtggcgatgagagcccagcggaactggacgccgataaagaattcctgcgacgccttgagacgctgcggctgaaggccggcctggccatgggcctgggcgatgtcagcggcaaagtgattcccaagccggtgctggtctcgcccgcgaaagctggcggtacgattcaggttcgctatttcatgccgcacaactgccaccgcgcgctcgccattaccggctcgattggtctggccaccgcgtgcgtgatagaaggcagcatcgtcgcgcagatgcttggcggggtcagcacgccgcgtcgtgaagcggtgcgtatcgaacacccaagcggcgggattgatgtcgtattgtcctacaccggccgcaatggtgagacaattcaagcgtccgtcgtacgcaccgcgcgcaggctgttctccggttacgtctacgccactgagtcacagcgcctcgccggataattccggcggtcgttggcatttttgcatccgcacaattctaaaaatgggtgatgccatgaaagttgttaaatcgctctacttccagatcctctgcgccgtggtgctgggcattgtggttgggcatttctgggctcagcaggccatcgcactcaaaccactgggtgatgcgttcatcaagctcatcaagatgatgattgcccccgtggtgttctgcaccatcgtcaccggcatcgccggaatgagcgacaaacgctcgctcggacgcctgctcagcaagaccatgctgctgttttttggccttacggtgatcagcctggtcattggcctggtggcggtatacgtgttccagccgggcgtcggcatgaacattgatcccacccaactgagcaccaaaggcttggcccagtacaccgagtcggcggcaaagcttggggttgtggagttcttcatgcacatcatccccgaaaccttcgtgggtgccttcagtaagggggaagtgctgccggtgctctttattgcggtgttatccgggtttgccttgtcatccctgggcgagcgtggcaagccggtactcgacgtactcgaagccgcttcgcagatggtcttcaagatcttcgcgtacctgatgcgttttgccccggtcggagccttcggcgccctggcgttcaccgtgggtcagtacggcatcacttcgctgggttcgctggcgaagttgatcatgaccttgtacatcgcctgcggcttcttcgtgttcgtgatcctgggcagcatttgccgtagcaacggcttcagcctgtggaaactgttgcgctacttccgtgaagaattcctggtggtgctgggcacgtcctccacggaaccggtcatgccacgcatgctggaaaaactcgaagcgctgggctgcaagaaaggcgtcgtgggcctggtactccccaccggctactcgttcaacctggacggtacggccatttacctgtcgttggcggcgattttcattgcccaggcctgcaacattgacttgagcctgacgcaaatcatcaccatgctggcgatcatgctgttgtcctccaaaggtgccgccggcgtgacgggcagcgggttcgtcgcgctcgcttcgaccttgacggtcattcacgacatcccgttggccggcctggcgctgctgatcggggttgaccgcttcatgtccgaggcgcgcgccctgaccagcctggccagcaacgccgtcgcgacggtagtgatttccctatcggaaaatgcctgccatcgcgaaacgctgcaccggatgctcgacgcaaaaccctctgcgacgccggtagaagcctgggaagacctgaaagtccccaagcgcgtttaacaatcaccgggcaacgcccctccctgacttgacccctcctccgccaggcgcctttggccgcccggcggatcagggcgcgtgcgcctcggcgtcagccactattacgataacaacaagagaatcgtcctatgctcgctttccttggcctggccatggtggtcgtatttaccgtcctcatcatgacgaagcgtttgtcgccaatcgtcgcgctcaccgttgtacctatcgtcttcgcggtgattggcggtttcggtggcaccaccggcaagatgatgctcgacggcctgaaaatggtcgcaccgtctgccgcactgctgttgttcgcgatcctgttctttggcctgatgatcgacgcaggcttgttcgacccgctgatccgcaagatcctcaagcgggtcaatggcgacccgatgaagatcgcggtcggcactgccctgctgtccttgctggtcgcactcgacggcgacggcaccacgacctacatgatcacctgcgcagcgatgctgccgctgtataagcgcatcggcatgaacccgatgatcctggcgaccatttccatgctgtcgctgagcatcatgagcggcatgaccccctggggcggccccgcgacacgggctattgccgcgctgggcctggatgccggcgaatacttcgtgccgttgctgccgaccatgatcggcggcgccctgtgggtgatcttcaccgccttcctgctgggacgtgccgagcgcaagcggatcggcaatgtccaactgcagagcggtggcggcgattgctacatcaacgcgattcttgaggacaccccccacaagcgtccgaaactggcctacgtcaatctggtgctggtcattgcggtgatggcggccctggtgatggggttgatgcactccgcgatcctgttcctgatcggctttgtgctcgcgctgatgatcaactacccgcaattggacattcagaaagaacgcatcctggcgcactcgggtaacgccatgaccgtggtgttgctggtattcgccgccgggatctttgccgggattttttccggcacaaagatggtggacgccctggcacagaccctcgtcgactggatcccgccatcctggggccacctgtttccattggtggtggcgatcaccagcatgccgctgacgttcgtgctgtccaatgacgcctactattttggcgtggtgccgatcctggccaatgccgccgccgcgtatggcatcgatccggttgaaattgcgcgcgcctcgatcctggggcaacccgtccacctcatgagcccgctagtggcctcgaccctgttgctggtgggcatggtcgatcgcgatatcggcgacttccagaaggccaccgtcaaatgggcagtgctgacctcgctggtcgtcaccgcgctggccttgttgaccggggccatcagcctgttcacctgatccacccacaacctctgctgtctttcagcgcgcctcgctcacggggcgcgtgtcgccctgcaccccaaataacaacaaagagtcatttgccatgaaccctatgtatgcccgtcgggctttgttttgcgcgttaggcctggtacccgtcgcaggagccaacgccgaaggttttattgatgacagcaaactcaagctgcaactgcgcaacgtgtatttcaacgagaactttcgcgacgagcacggcttgagtgcgcgagccgccagaacggcaaaaagcgagcgtaccgagtgggcccagggatttctgctggactatcagtccggatttacgccgggcaccctcggctttggcgtggacgccctggggctgtatggcgtgaagctcgattcagggcgcggccgcagtggcaccgggctcatgccggtgcacgatgacgggcgagcggcccacgagttcgccagcgccggcgaaaccgcaaaggccaggttcgccaaaaccacggtcaagtacggcaccttgctgcccaagacgccggtgctgatttacaacgatgcacgcttgttgccccagacctaccagggcacccaggtcagcagcaccgacatcgacaacctgaccgtcaccggcgggcacctggaccgtttcaaactacgcgactccaccaacagcgtgccgatcgtgcccgacggctacagcggggaaaaatcgggagatttcaactacgccggggctgagtacaaatggggcaaaaaccttcgcttgagttatttctacggggaactcgagaacttctaccgacagaactttgccggcatccagcacgacctgccactggccggtggtgtgctgaccagcgacctgcgctacttcaacagtgttgatagcggcgctggctacgcgggcaaaatcgacaatgacatgttcagcggccagttgtcctacgtgatcgcaggccataccgtcggagggggctaccagacccttcgcggagatgccggtctgccctacatcagcggcgccaccgtctactcattcagcaacgccggtatcggcaaattcatcgaggaggacgagaagacctggatgctcaactacggctacaacttcgccgccgtcggcgtacccggcctgaccttctcggcacgctacctgagcggcaatgacggcaagtccacgaccacggtcaaggaatgggagcgtgataccgagctggcctacgtggtgcaggccggcacgttcaaggggctgggggtgcgcatgcgcaactacgtctatcgctctgaattctcccggggccgcgatagcaaccgcctctacctcacctatgacattgccctctggtaagtcgacgatcgcggcccttgcggccgctttccttcaggttaaggtgaggacatcccaacatgctgttcaagaacaaatactgattctgccggtgaccctgcccgttcatggcctgctcaactggagcacttacctgttcaaggacaaggcattgtgatatcactgcttccaaggccgcggcctgaagcggcggttctggagagcggtcgatgagggtatttggcctggcaatactcatcccaacatgcgccgtcagctatctcatctgcacgggtgacacagcaatagcgctggcggccagcttcttgttctatctcagtgcggtcctgctctacatgtatccgtcggtttgcgtagccctcctccaccctgatcctccccgtgccttactcacgaaaaatctccttgcgggctggaccggcatcggctggttcaaggcctatcgttgggcccttgccgaactgcgccaacacgaagcaaatgcactcaagcgcggagatagaaagtgatggcctattggcacttcttcaaaaggcgcaggtcaatcgtgcatcactacccacgttagtacgtcatcatgcacagctggaagaaaatatcgctgaccgagggtctggagcggagcctgccggggcacaaggtcgattgcgttctgatcaatggctggactgctaccgtctttgtcaggtcgccagaaaccgaatcaatgttttgtacaacgggtatcaacctggccaagcttgcagaccgctcgagcgtgcagcagcttgcagacgagataacatttgagattgatatgtccaggaccaggagcgccggctagcgctccccctgcttgatcattcaatttcgctgcaacaaggtgttaggcgcgacgccgaacgctttgcggaacgcatggctgaaatgggagaagtcagaaaacccgaagtccagcgcggcctgcgagatactgcgcacctggccgcgctcgatcgcttcacggctggcattcaggcgttccctccaaatctcggcggcgggggttttctggtaccgcgcgaacgcgcgcgtgacggtgcgggtggacacattgtgggcttgagcgatgacctcaatcgacaggtccggctcggccagatgccgttggatgtactgcatgatgcggccgtaaaggtccagttcctggtgagtggccttcaggtcctggagttccaggctgatcaccagaaggtcgagcaacgcctctgaatagcgactggagatgccctgatcctgcaaggatgccggggtaatcgctgcttggcgcagcatttcacgcaagggaatcacgccgggccgccgatcatcgagaaccatcgcggtgtgctccgcaatacgcggcaggcgttcagtcagcaatgcccgcggaatacgcaccaggtgattttcggtaccaccgaggctgaatcggaacggttgcgttgcgtcataaagaaacaaattgccagtggccaggctggcttttcttccgctctgttcaatttgcccatgaccgttccgggcgaaccccagccataaatcgtcggccggaccgctacgcagatgttgcgcggaacgctcccagtaatgcaggggcgatgacagtgaacagatgtccagacggcctaaggtattgaccgcaagcacaccatcgaaactgctctgggacaagggtttgctatcggccgccaggcaatggcggcagaccacttctttccagtaatcaaagcgacgtggtgcagcaacagcaagggtcgaatactgagtgcttggattcatggcactgacctcggtacggcaatacagttagagctcgaaaaggtgttaccggcttttcagcgctagcaattaataggccagacacattgacggtcgccctcacgtactcatagcgacttcctgcgcccgagcgtccccaataagaggcaaacaggcctgggctttcgacacgggcgcaccaacgccgatcaccggaggggtcccccccggggttgtcttttccaaccaaacggttgtctcgacgaaccaagcggcctctcgccgtcacgcctaatttccacctcacagcagctcaacccccgctgatgaggcacgccatgcatcgacactgttcacaccctttggctgatgcctcctggctcctgcacaggcgcgacctcgtgcctgaagagtcggcttattggttgatcgagtggggggccatgaagctgctgcgccgacgacagaccgccaagcgcgacccgtcgcccaagcactgatgcccacccgtaggcctgaacgaaaataacgaggagctcaacatggaatctgcaatcgacacacatctcagatgcccacgcaccctgtcgcgccgcgtgcccgacgagtaccagccgccctttgccatgtgggttgcacgcgccgacgagcaattggaacaggtggtgatggcctacctcggcgtgcagtaccgaggggaagcgcaacgcgaagccgcgctccaggccatgcgtcacatcgtcggcagcttcagcctggccgatggcccgcagacccatgacgtgacccaccacaccgacaacagcggctttgataacttgatcgtggtcggctactggaaagacccggctgctcactgccgctggttgcgctgtgctgcggtcaacgactggtgggcctcccaggatcgcctcaatgacgggctaggctattttcgtgaaatcagcgcaccgcgcgccgagcagttcgagacactctacgccttccaggacaatctacctggtgtcggcgccgtcatggacaagaccagtggcgaaatcgaagagcacggttactggggctcgatgcgcgaccgctttgcgatctcccagaccgactggatgaagcccacgagtgagctgcaagtgatcagcggtgatcctgctaggggcggccgggtggtggtgctggggcatgacaacctcacgctgattcgttccggccaggactgggcggacgccgaggcggatgaacgctcgctgtacctcgacgaaattctaccgacgttgcaggacggcatggacttcctgcgtgacaacggccagccgttgggctgctacagcaaccggttcgtgcgcaatatcgacctggacggcaattttctcgacatcagctacaacatcggacactggcgctcggtggaaaaactcgagcgctgggccgaatcccacccgacccacctgcgtattttcgtgacgttcttccgcgtggccgccggtttgaaaaagttgcggctgtaccacgaagtgtcagtgtcagacgccaacagccagatcttcgagtacatcaactgccatgcgcacaccggaatgctgcgcgatgccgctgccgcacaaggagaacggccatgaaattgagtcgagtcgtgttggtgctggggatgttgccgtttgccaaaagccaggccctcgaggtcgcgccgggggatttcgaaccgctgcccgccggggccgatgcggtgttgttttactaccagcacgccaaccggtccgagctgtatcagaacggccatcgaacctccgacaacgccaagctcagctccgacgtaggcatcctgcgttacatccatgccataggccttggcgaaaacctttcatgggaaccgcagatcttgctgccgttcggctacatgaacgcctctggcgacgtcggcgcgctgggtgatgcacatggcctgggtgacccgattctcaccgccccgctcaagtggacactccccaccgccaacaaggatgtgtttgccctggccccctacctgtacatccccgtgggcagctacgacaaaaacgacgccttgaacctgggcgagaaccgctggcgggcaacgttacaagcggcctatatccaccacttctcagcgcagtgggcattggacaccgtcgccgacgtgtcctgggtttcgaccaatcacgactacggtaccagcagcgcgaaactcgaagaaaacacgcgctacgagtaccaggccgccgtgcgctacaactggaccccaagcaccacgttcgccctcggtggaggctatgtcaccggggccgcaaccagcatcgacggcgttgaccagcacgatggcgtgtcgacgtcctacgcacgtttcacagtcacgcactttattgatcccacattgcaggtacaggcgcagctcggcagggatatcgaggtggagcaaggcttcaaggaaggcgcgcgcctgaatctgcgcgtcttgaaagtgttctgaatgccgctgtccttttcagccaagtgcgtgtcctgctcaaccatgcgaatacggtgatagacgcctaatttggtgtacatcaccacccggactgaatcgataaaaagacaggaaaatcatggccattactcgtcccacgctggatcagctgttagccatcgcggcccagttgaacatgcgactgacccaggaacaggcagcgtcctatctggatctgatgcaaccaagtttcgatgcatacgatctggtcgacgaactgtgtgatttcgttccgccgatacgttacgagcgcagctcaggctatcgcccctcggccaaggaaaacccgctcaacgcctggtactaccggactgaagtgaatggcgcccgtggcggcctgctggccggtaaaaccgtcgcgctcaaagacaacatcgccctggccggcgtcccgatgatgaacggcgccgcaccgctggaaggttttgtaccgggtttcgatgccaccgtggtcacacgtctgctcgatgccggcgcgaccatcctcggcaaagccacttgcgaacactactgcctgtcgggcggcagccatacctctgacccagccccggtacacaacccccatcgtcacgggtatgccgccggcgggtcgtcatcgggcagcgcggccttggtcgccgccggtgaagtcaacatcgccgtgggcggcgatcaaggcggctccatccgcatcccgtcggccttctgcggcacctatggcatgaaaccgacccatggcctggtgccctacaccggcatcatggcgattgaagcgacgattgatcatgtcggtcccatcaccgccaacgtgcacgacaacgcgctgatgctgcaggccatggccggttccgatggcctcgacccacgccaggcggcgcctcaggtcgatgactattgcagttatctggcgcggggggtgagcgggctcaggatcggtgtgttgcaggaggggttcgcgctggccaatcaggatccgcgcgtggcggacaaggtgcgcgacgctgtcgcccgtctcgaggcgttgggcgcccatgtcgagacagtgtccgttcccgaacacaacctggcaggttcgttgtggcaccccatcggttgtgaaggcctgaccatgcagatgatgcatggcaacggcgcaggctttaactggaaaggcttgtatgacgtcggcctgctggacaaacaggccggctggcgcgaacaggcggaccaattatccgcgtcgctcaagctgtgcatgttcgtcggccagtacggcctgacccactacaacgggcggtattacgccaaggcacagaacctcgcccgctttgcccggcaaggctatgacaaggccttgcagagctatgacttgctggtgatgccgaccacgcccatcactgcccagccccacccgccggcgggctgcgcgatcactgaatacgtggcccgcgccctggaaatgatcggcaataccgcgccacaagacatcaccgggcatccggccatgtcgattccctgcggcctggtggacgggctgcccgtcgggttgatgctggtcgccaggcactacgccgaaggcacgatctaccaggccgcggcggcgttcgaagccgcggtggactggcgcacgctctgagcgcccaacctgaaaacaataagaaagaccggcacgtttcaaccactccacaaccgcgatgactgacaggagataccccatgagtccatctacttccacgcctgcgagcacttcaacccccggtgaacgggcctgggcattgttccaggtcctcaagagcaaggacctgattccagagggctacgtcgagcaactcacgcaattgatggagcacggctggagcccggagaacggcgcccgggtggtcgccaaggcctgggtcgatccgcagttccgggcgctgttgctcaaggacggcaccgctgcatgtgcccagttcggctataccggcccgcagggcgaatacatcgtcgcgctggaagacacgccacaggtaaaaaacgtgattgtctgcagcctgtgctcatgcaccaactggccggtgctcggcctgccacccgagtggtacaagggcttcgagtttcgtgcccgcctggtccgggaggggcgcaccgtgctacgcgaactggggacggagttgccaaccgacgtggcggtcaaggtctgggataccagcgccgaaacccgctacctggtgttgccgctaaggcctgaaggttccgaacacatgagtgaggagcagcttcaggcactcgtgaccaaagacgtgctgatcggcgtcgccctgccctgcgttggctgagaaaaaccacgcatcatcgttcaactcccggagtttctattatggatggctttcacgatctcggcggtttccaaggctttggcaaagtccctcacaccatcaatagcctggactacaaacaggtattcaagcaggactgggagcacctggcgtacagcttgatgttcgtcggggccgatcatttgaaaaagttcagcgtggacgaagtgcgtcatgccgtcgaacgcctggacgtacgccaacatgtcggcacccagtactacgaacgctatgtcatcgcaaccgccaccttgctggtcgaaacgggcgtcatcacccaggcggagctcgaccaggctttgggctctcacttcaagctggcaaatccggcacaggcgggagggcgtgcggcgatcaccggtcgcgctccgtttgaggtcggcgaccgcgtggtcgtgcgcgacgagtacgtggccgggcatatccgcatgccggcctatgtgcgcggcaagcaaggcgtggtgttgcaccgcactgcggaaaaatggccgttcccggacgcgatcggccatggcgataccagcgcggcgcatcagccgacctaccatgtggagtttgcggtgaaagacctgtggggcgatgcagcagatgacggcttcgtggtggtcgatctgttcgaaagctacctggaccacgtcgatgcccctcgagcggtgaacgtatgatggacggcacccaggcgggccgactgccggtgacggtgctttccggcttcctcggtgccggcaagaccacgctgctcaaccatatcctgcgcaatcgcgaaggcctgagggtggcggtcatcgtcaatgatatgagcgacgtcaatatcgatgccgccgaggtgcagcgcgacgtgtcgctgcaccgtggtcgcgatgagctgatcgaaatgagcaacggctgcatctgctgcacgctacgcgccgatctgctcgaacagatcagtgccctggcgcgtcagcagcgtttcgattacctgctcatcgaatccacgggcatctcggagccaatgccggtcgccgagacgttcgccttccttgacgctgaaggcttcagcctcagcgaactggcacggctcgacaccctggtgacggtggtcgatggcagccgttttcaggcgttgctcgcgtcaccggacaccgtggcccgcgacgatacacaggagaacacctctgcacgccctttggcggacctgctgatcgagcaggtggagtacgccaacgtcattctcgtcaacaaacgggacctgatcgacgagccgggttatcaggccgtgcaggcggtcctcgcaggccttaacccgacggcgcggatcataccgatggcccacggccaggttgagttgacccgcctcctcgacacctatctgtttgacttgcccagccttgcggcgtcgccgggctggatgaggaaaatggaggttgaagacgctccggcctccgagtcggacacctatggcgtgacgtcctgggtgtaccgcgaacgcgcgcccttccacccacaacgcttgctcgatttcctccaacagccctggagcaacggacgcctgttacgcagcaaaggttatttctggctggccagccggcacttggaaaccggcctgctagcgcaaagcggcgcgcagttccagtgggactatgttgggcactggtggaacttcatcgagcagtcgcagtggccgcgggatgaataccggttgcagagcatcatggccaagtgggacagcatcgtcggcgactgtcggcaggagtgggtgttcatcggccaggatctcgatacccacgcgttgcagcgtgagctcgacaactgcctgctcagtgccgaagaaatcgccgccggaccgtcggcctggcgagccctgccgggggccgcggcctttgatgcacaggccctgtcggctcccaggcaggctgaatccatttgacgaggtagaggtgttccatgctctttttcagccgaacccaccgctgggtactgacgccgctcgccgacaggctggagcagcctgaccaggcaagcacgccgctgtcgtcgaataacccgatattgcgccgcatcctggccggcgtagaccaactgctgcaggagcggcgaaccctgaaggaccaaacacgcgcattgggcctggaagtcgcccgattggatcagcgcctggccggccgcgacacacaattgcgccaactggaagcgcacttgaccctgatcacccagggcgccggtgaactgttttgggcgctggaactcgatggaaccactgcccctgcgccggactgtgcgctgcaatggatggggtcggcgtcgatccagccccagggtgttgatcaactgggccgttggagtgaacagttgcacccggctgaccagcaagcgcatcgggaggcgcttacccggcatctggccgatcgcagcgggcgtacaccctttgcgttggacgtgcggataaagcctgcaaccggcgacgactatcgctggtgcaggatcagcggtgagtcgcggcgtgatgcgcagggcctcgcggtcgccatcggtggcagcgtacgtgacattcatgaacaacgcctgcacaacgaaacgctcgaactggcggccacccgtttcgatatttcccgggagatgctgcatgacgggctctgggacatcgaggtggtagcgggcgacccggcgaacccgaaaaacaccatttggtggtcgtcgcaaatgcgccggctgctggggtgcagcacggttgaggagttccccaacaccctggaaagctggacctcacgcctgcatcccgacgatagcgctcgggccatcgcagcctttgtcgcccatgtggacgaccgcagcggccggaccccatttgacgtggactatcgactcaaacacaaaaacggcacctaccgctggtttcgcggccgcgggcaaacacgtcgcgccccggacggctccccgcagagggtggtgggcgccattaccgatatccatgcccaccatgaagaaagtgcgatgcgcgaaacgcaggcgcaacagcatcgggtgatgcaggagaccctcagcaagctgacgcagattgtcgccaccatccagggcattgccagccagaccaacctgctggcgttgaatgccgccatcgaagcggctcgcgccggcgaggccgggcgcgggttcgcggtggtcgccgatgaagtgcgcaagctggccacccgcaccagccaggcgacccaacaggcggccgagatgatagacggctaaccacgtgcccccgcgctgcgggcgtgggcaacgcacatattccaacaataacaatcaggtacgttatgcgcgattacaactcagcagtgagctccttcgattttttacgcttggccgcgcaggatttacagggcgagctgaatgccttgaatgcctgcgtcgaatgctgcgaccgacacgccgacgtaaatgccgtggcgttgtattgcgaaacgcgggatggccgcgccacgcactaccgtttcagcgaactgcaagcccacgctgcgcgcttcggcaactttctgcgggaacagggggtcaagcccggagaccgtgtcgcgggcctgatgccacgcacggttgaactgttgatcgccattttgggcacctggcgtatcggcgcagtctaccagccgctctttaccgcgttcggtccaaaggcgatcgagcagcgattgggctgctccaaggcacgctggatcgtgaccgacgtgcacaaccgttccaagctggacgacatccccgactgcccacgcatcctggtgaccggcgatcatgcatggaccccaggcgattacgatttctggagcgcgctggatcgtcaacacgccgagtgcgcgcccgcgttgctggatgccagcgcgccttttttgctgatgtgcacctcaggcaccaccgggccggccaagccgctggaagtgcctttaagcgctctcctggccttcaagggttatatgcgtgatgccatcgacttgcgtgaggaagacccgttctggaacctcgccgaccctggctgggcgtacggcctgtattacgcggtgaccggtccattggcatgcggccatgccacattgttctatgacgggccgttttcggtggagagtacctgccggatcatcgcgaaatacggaatccgcaacctggccggctcaccgacggcctatcgcctgctgatcgcagcaggggacgcgttcgccgacgccgtgcgtggtcacctgcgtatcgtcagcagcgccggcgagccgcttaacccgcaagtcatccgctggtttgccgaacagctcggcgtggtcatccacgaccattatggccagaccgaaatcggcatggtgctgtgcaatcaccatgggctagaccacccgatacgtgagggatcggccggttatgcgatgccgggataccgcattgtcgtgctggatgacgcccaccgggaattgccgactggccagccaggcgtgctggcggtggaccgcgaacgttcgccgctgtgctggttcaagggctacttcgcgatgccgaccaaagcctttatcagcggctattacttgagcggcgatattgtggagttgaatgacgatggcagtatcagcttcgtcggccgtaacgacgacgtgatcaccacctcgggctatcgcgtcggacctttcgatgtcgagagcgcgctgatcgaacacccggcggtggtcgaggccgccgtggtcggcaaacccgacccgcagcgcaccgagctgatcaaggcatttatcgtattgaatggccagtactcgcccagcgccgaattggcggaagtcctgcgcctgcacgtgcgagagcgcctggctgcacacgcttacccgcgggaaatcgagttcgtcgaacaactacccaagacgccaagtggaaagctgcagcggttcattctgcgcagccaggaaatagccaaacagcaggcactcgacacatgactcacgggcgaatggttcctgtgctgagccgaagggagtttcagcgcagagccctggagttgttcaaggagcgcagtttcagccaagtgagcgtgcgtgaattggcggcgcatatcggcataagcccgggagcggtttatcatcacgtcgagagtaaagaggccatgctgtttgaatggctgatggagctgtatcaggcgttgttgtcgcatgttgatttgatcaaaacgcgaagattgacgcccgcgcaacgcctgacaacactgatcgacgctcacatccaactgtatgaccacatgactgtgcacttcaagttggccgtcatggatgccaattgtctaggcgcagcaatgcaggcacgcgttgagcgattgaagcttgcctatgaggcagaattcataaaatgggtcgaccaggcttgccatcagcctggcgggccgttgcgcgagtgtgcgctcacagccattttgccgatgctcaatagcctgcctgcatggttgagccccatgatcgataacgctcagcgtcgagtgatcgcaaagaccatcgccgaagcagtactacacgcgataaacgcgcttccttccaacacgtcgccctgaacggcgagatgcgctgcgctgggtgatgatagacccacccagctttggcgaaccgtcccgcgggctaagccacctgggtcgcaaacctgccaacggcgtcgaccacccgcttggcaccgtcctgaatttcaacaatcacctggcctgcctgagtggcaagctcaaggccttgctcggcttgggacttgctgtttgccatctcagcgacggtttcatcgaccaacttctgattctgcaagacaaccgacgcgatttcttcagtcgctgtgctggtccgtccagccaattgtcgaacctcatcagccacaacggcaaatcctcgaccttgctcacctgcgcgagccgcttcaatcgccgcattcagagccagaagattggtttgctgcgcgatgctgctaatcgtctggataattgagctgatcaacaatgactgtttgcccagcgcttctactcccccagaggccgcctgcatatcaaccgcgattttacgcatggtatgcatcgtgtcgttgacgacgactgcgcctcgttgagcgctgacatccgtttgctgagatatttcaaatgccgtttgggctgccccgctcacttcatgctcacggtccacttgatcggtcactaccgtcgcgaacttcactactttgcaaagattgccttcggtgtcgtaaaccggattgtaggttgcctccagccacaccgtttgtccgcgactgtctatacgttcgaaccggccagcgacaaactcacctctgttcagctttgcccagaagtccttgtactcctgggacgaagtcagctccggtttacagaaaacacggtgatggctcccttttgcttgtcccaggttgtagcccatggcttgtaaaaactgatcatttgccgtcagtacatgcccagagagatcaaactcgatcaccgcggtagaacgtaacaacgcctcgatgaatgaggcattttccgaggctttttctactcgggacgtaatgtttgtcgcgtagcaagtgatgtggctcagctggccgctcgcgtccatgatgggctgccaatgtgcatgaatccacaccaacgaaccatcggcatgaaggtatctgtaatcgtcgctgatcgacttccccgcggccactgcagctcgaaagttatgaaagcacggcagcttggagacgtactggggaacaatctcggccatggggcgacctacaagccgatccggagcatagcccagcgtatttccaaagttttcgttgcaggccatgatgttaaatgagggatcgatacttaacgtcagcatttcacgatccaggccatcgcgcagttggcgaagctctaacagttcactgttctgagattgaagctgtttcttaaggcttgcattgaacataggaagtcgcctcttgggtcatacctatcgtatcggcgtctcatggcacaaattgagggcgtggaccaagaatgaccgctggccccgtgaggaaatcatctggtccaaggcagttgcggacctgaacatcagcgaaatcaccggggagttttgcgcaggcacaaaaaagccgatctagttgatcggcttaagagtctgattttactcaggaataatggtcgggacggagtgattcgaacactcgacccctagcaccccatgctagtgcgctaccggactgcgctacgccccgactaggcgtgttactgggtttgcttcttgacgaagcgaaccggaatataccgcaagcttttgaaatgtggaagtattttaaaagccggaattactttttcagaaccaccagcacatcttcgagttcggcgatcatctggcggatcatttgtttgtattgggtggtgtcgtctttggcttcatcaccggacatacgctggcgcgcgccgctgatggtgaacccctggtcgtagagcaacgcgcggatctgtcggatcatcagcacatcctggcgctgataataccgacggttcccggtgcgtttgacggggttgagttgaggaaactcctgctcccaatagcgcagcacgtgcggttttaccgcacagagctcgctgacttcaccaatggtgaagtagcgtttgcctgggatgacgggtagctcgtcgttatgacttggttccagcataagcctcaactcgggccttcaacttctgccctggacgaaaggtgaccacacggcgagccgtgatcgggatttcttctcccgtttttggattgcggccaggccgctggcgtttgtcccgcaggtcaaaattgccgaaaccggacaatttgacctgttcgttgtcttccagagcgtgtctgatctcttcaaaaaacagctcgaccaattccttggcctcgcgcttgttcagacccaactcttcgtacagacgttccgccatctcagctttcgtcaaagcccccatacgtcacttccttaacgtggcgttcaacctttgttcgagcgaggtgaggatattttgtgtcgtggtattcacctcatcgtcattaagagtgcgcgatggatgctgccaggtcaagccaactgcaaggctttttctatgcggatcaatacctttaccctgatagacgtcaaatagcctgaggtctgtcagccattcccctgcattttcacgaattacatccagaacggcagtggcggctacttcacgatcggcaatcagcgccaggtcacgacgcacttcagggaagcgcgacagctcgctgaatttaggcattttgcccgaagccacttcagccaggagcagttcgaacacaaataccggacgatcaagaccgagggttttcgacaattcagggtgaatggcgccgacgaaacctaccaaacgcccttcgcgctcaacgcgtgcagtttggcccgggtgcaacgccgggtggctgcctggtacgaaggtgaacgcgtccagtgcaccggcaaagcccagcaccgcttccacgtcagccttgacgtcgaagaagtccacggcatcgcggccctgcgcccaaccttcgggcaggcggctaccgcaaacaacaccggccaacatcggctcttgcttcaagccatccagttgaccaacgaaacgcaggccactttcgaacatgcgcacacggtcttgctgacggttcaggttatgggaaagtgctttcaccaggcctggccacagggacgaacgcatggctgccatgtcgttggagatcggatttgccagcaacagcggctcgacgcccgggttgaacagttcgaactgcttcggatcgatgaagctgtaggtcacggcttcctggtagccacgggcaaccagcaggcgacgcagttcaggcaaatgcgcacgcgcctcggccttaggttgcggcgccagacgcgcttgcgggtaacgaaccggcaggcggttgtagccgtagaggcgagccagctcttcgatcaggtcgacttccaggctgatatcgaagcgatggcttggtacttcaacggtccactgcccttccccgcctgcggaaatacccaggccgagggcggacaacagttgctcgatttcagccggtgcgatcaccaggccgagcatctgctcgacgcttttggcgcgcagggtgatcggcgcaaccgacggcaggaactgttcattgacggtttcggtgattgggccggcttcgccgccggtgatttccagcagcaggccagtggcgcgctccatggcttcacgggcgaggttccagtccacgccgcgctcatagcggtgcgaggcgtcggtgtgcaggccataggaacgggccttgccggcaatagcgatctgatcgaagaatgcgctttcgaggaatacgtcgcgagtggtcgcagatacgccgctgtgctcgccacccatcacgccggcaattgccagggcgcgggagtggtcggcgatgaccagggtatcggcacgcaggctgacttcctgaccatcgagcagcaccagtttctcgccttcttctgccatgcgtacgcggatgccgccgttgatttcggcaaggtcgaacgcgtgcagcggttgacccagctccagcatcacgtagttggtgatgtcgacggcagcgtcgatgctgcgcacgtcagcacgacgcaggcgctcaaccatccacagcggggttggcttggacaggtcgacgttgcggattacacggcccaggtaacgcgggcaagcgttgggtgccagcacgtcgatcggacgtacttcgtcgtgcacagcgggtacagcagcaacggccggacgcgtgaccggggcgttgtacaacgcgcccacttcacgcgccaggccggccagggacaggcagtcgccacggttcggagtcaggtcgacctcgatgctggcgtcttccagttccaggtaaacgcggatgtcctggcccacgggcgcgtcggcaggcagttccatcaggccatcattgccctcgccgacttgcagctcggcctgggaacacagcatgccattggactcgacgccacgcagcttggccttcttgatcttgaagtcgcccggcagctcggcaccgatcatggcgaacgggattttcaggcccgggcgcacattaggcgctccgcacacgacctggaaggtttccgtgccattgctgacctggcacacacgcagcttgtcggcatctgggtgttgctcggtgctcagcacctcgcccactaccacaccactgaaaacaccggcggccggggtaacgctatcgacctcaagaccggccatcgacagacgagcaaccagctcgtcgcgatctacttgcgggcttacccagccacgcagccattgttcactgaatttcatcctgctctcctaaagattcgttacgactagcgaaattgcgcgaggaaccgcaagtcgttgtcgaagaacagacgcaagtcgttcacgccgtaacgcagcatggccagacgctctacacccatgccgaaggcaaagcccgagaattcttccggatcgatgccggacatgcgcaacacgttggggtgaaccatgccgcagcccatcacttccagccagccggtctgtttgcagacgcggcagcctttaccgctgcacatcacgcattccatatcgacttcagcggacggctcggtgaacgggaagaacgaaggacggaaacgcaccgccagctccttctcgaagaacacccgcaggaattcttcgatggtgcccttgaggtcggcgaagttgatgtcgcgatcaaccagcaggccttcgacctggtggaacatcggcgagtgggtgatatcggagtcgctgcggtacacacggcctgggcagacgatgcggatcggcggcttgttcgcttccatggtgcggacctgtaccggcgaggtatgggtgcgcaacagcatgttcgcgttgaaatagaaggtgtcgtgcatcgaccgggccgggtggtggcctgggatgttgagcgcctcgaagttgtgatagtcgtcttcgacctcagggccttcggcaatgccgtagccgatgtgggtgaagaactgttcgatacgttccagagtccgggtgatcggatgcaggccacccgaggcctgaccacggccaggcagggttacgtcaatggactcggcggcgagcttggccgcaagatcggcctcctcgagcgacgccttgcgtgcattgagcacctctgtgacacgctccttggcgacgttgatcagcgcaccgacttgcggacgctcttcagccggcaaattccccagggtcttcatcacctgagtcaattcaccttttttgccaaggtagtgaaccctgatttgctccagggcatttacatcttcagcgctttgcacagcctcaagggcttgagcgacgagcgcgtccaggttttccatgtacagactccagatacaaaataggggaagagcttgaaggctcttcccctatttatgacgtttaacaccttgggctacagagtaacccagggtgactgtcgggggtacttaagccaaggtggctttagctttctcgacaatcgcagcaaacgccgctttttcgttcactgccagatcagccagaaccttacggtcgatctcgatggacgcttttttcaggccagcaatgaaacggctgtaggacagaccgttaacacgtgcaccggcgttgatacgagcgatccacagagcgcggaactgacgttttttctgacgacggtcacggtaggcgtattggcctgccttgattaccgcttgcttggcaacacggaatacgcgtgaacgcgcgccgtagtagcctttagcaagtttcagaatttttttgtgacgcttacgggcaatgacgccacgctttacacgagccatgagttacttcctctattcttgatccaaaaattaacgaaggcgcagcatgcgctcgacttttgccacgtcagacggatgcagcaagctgctaccgcgcagttgacgcttacgcttggtcgacattttggtcaggatgtggctcttgaaagcgtgcttgtgcttgataccgttagcagttttcagaaaccgcttagcagcaccacttttagtcttcatctttggcatgttcggatactccgcattcagttgataaacataatcagaaggcctgccgtgccctgttgattacttcttctttttcggggcgatgaccatgatcagctggcgtccttccatcttaggatgctgttcgaccgaaccgtactcgagcaggtcagcttcaacccgcttgaggagttccatccccagctcctggtgggccatctcacggccgcggaatcgcaaggataccttggccctgtccccatcactcaggaaacgtaccaggttgcgcagttttacctggtaatccccttcctccgtccctggacgaaacttgatttcttttacttgaatctgcttctggttcttcttcgccgcagcaatctgcttcttcttctcgaagatcgacttgccgtagtccatcacccggcaaacaggcgggactgcgtcggcggagatttccaccaggtccaatttggactcttcagcgatacgaagcgcttcatcaatcgagacgatgccaatctgctcgccgtcagcgccaattaaccgaacctcgcgtgccgagatattctcgttgatcggggctttcggtgcagctcgtttatcttgtctcatttcacgcttaataataattactccgaatctgggcgaccacgccgggaaaccgcttgcgcgaggaactcagcgaactgggcgacgggcatcgagcccaggtcagcaccttcacgagtacgcacagcgacagtctgcatctcgacttcccgatctccgataaccaaaagatagggaaccttgagcaaagtatgctcgcggattttaaagccgatcttttcatttctcaagtcggacttggcacgaaatccgctttcgttgagtgttttttcaacctcagcggcaaaatctgcctgtttatcagtgatattcatgatcactgcctgggtcggagccagccacgcagggaatgcaccctcgtagtgctcgatcaggatcccgacgaaccgttcgaacgagccaaggatcgcccggtgcagcataaccgggtgtttacggctgttgtcttcggacacatattcggcgcccagacggatcggcaggttaaaatcgagctgcagggtaccacactgccagacgcggccaaggcaatctttcagcgagaactcgatcttcggaccgtagaaagcgccctcgcccggctgcagatcgtacgcaaggcccgcactgtcgagcgcagcggccagtgcagcttcggcgcggtcccacagttcgtcggagccgacgcgtttttccggacgagtggacagcttcatctcgacgtcggtaaagccgaaatcgcgatatacatccatggtcagcttgatgaacgcggcggattcagcctgcatctgctcttcggtgcagaagatgtgggcgtcgtcctgagtgaagccgcgcacgcgcatgatgccgtgcaacgcacccgatggctcgttacggtggcaggcaccgaattcagccaggcgcatcggcaactcgcgatagctcttcaggccctggttgaacacctgcacgtggcacgggcagttcatcggcttgatggcgtaatcgcggttttccgactgggtggtgaacatgttgtcggcgtagttggcccagtgcccggatttctcccacaagctgcggtcaacgacctggggtgtcttgatctccaggtagccgttctcgcgctgaaccttgcgcatgtactgctcaagcacctggtacagggtccagccgttcgggtgccagaacaccatgcccggcgcttcttcctggaggtggaacaggttcaggcgcttgccgatcttgcggtggtcgcgcttttcggcttcttcgatgcgctggatgtaggccgccagctgcttcttgtcagcccaggcggtgccgtagatccgctgcagttgctcgttcttcgcgtcgccacgccagtaggcgccggacagtttggtcagcttgaaggacttgagaaagcgtgtgttcggcacgtgcgggccacgacacatgtcgacgtattcttcgtggtagtacaggcccatggcctgctcgtccggcatgtcttccaccaggcgcagcttgtagtcttcgccacgggcggtgaacacgtcgatcacttcggcacgcggcgtgactttcttgatcacgtcgtagtctttttcgatcagctggtgcatgcgctgttcgatggccgccaggtcgtccggagtgaaaggacgctcgtaggcgatgtcgtaatagaagccttcgtcgatgaccgggccgatcaccatcttcgcggttgggtacagttgcttgaccgcatggccaatcaagtgcgcgcaagagtggcgaatgatctccagcccctcttgatccttgggcgtgatgatttgcaggctggcatcggaggtgatcaggtcgctggcatcgaccagcttgccgtcgaccttgccggctacggtagccttggccaggcctgcaccaatggatgcggcgacctcggctacggaaaccgaatgatcgaatgaacgttgactgccgtcgggaagagtaatagttggcatggcgcctcctctcctagtggtgacccctaccaaaggtcacgtgggttgggatgagccagtacaagatccaacaccaggccgttcaatgatgaacgcctgccttacagcggcaggagcctttcggccaaccgataatcgaaccagagtgactggagtgagctaaaaagaacatggcaaggcggcaattggcgcgcctggaaatagccaagcgcaagatgctagcacagatgaacggtcatcgcggcgctgctatcttgtgtaacgacaaaatccgcgctttatagccgcaaaagtgaacttgagctgtacgcaatgcctcaaacccactgagaatcgccgttcgtcctcgacccaaaggagcatcctcatgatgcgttttacctctaccctcgctctcgccgcttccctgaccctcctttccctcggtgcacaggcagccgccccgtcgaactggccagccggtgcccgtgacagcttcgtcaacgactgcagcgcagccgccagccagaacgtagacgtcaagaccgccaaagaccactgcgaatgtggcgctgacaaaatcaatgccgaattgagcactgcagaaatcaaggaactcatgaccaacccgaacgccaagcctgagcttaaaaacaaagcggtcgcggctatttcgtcctgcaaagtcgtgaagaaaaagtaagatcggccacagatcagacggctttttatcgggcaaaacagcctgaaaactgccatttctcacaaaatacgcagcttttacggctttttttaccagttgatatttcgagcgaaagccccgtagatcggggctttcagccgggacaggtattaaacgcaacgctattgattagcaaacaatgccttgggggggctcccaagccgaacatttcgactatgatagcccggtgtgcccagttggcctgagcagcacagcactactgaaaatatatgtttcttggagatacaccatgtctaatcgccaaaccggcaccgttaaatggttcaacgatgaaaaaggcttcggcttcatcactcctcaaggtggcggtgacgacctgttcgtacacttcaaagctatcgaaagcgacggtttcaaaagcctgaaagaaggccaaaccgtttccttcgtggctgagaaaggccaaaagggtatgcaagctgcacaggttcgcggcgagtaattctccgctgagctaaaaaaaccccgtccatgtgacggggttttttatgggcactgcaaaagccttgagagacttagccgcaattgacccgcgtgatcaccaggttgtcatcggtgttcaggttgaggcggtcggagcggtattccagggtgatcatgtcgttaggcttgaggatacgtgcgttctgcgcaccggcacgggtacgcgcctgttccagcaactggggcgaggctttctggccgatggtgaattcggcggctttcgactcacagcggctatgaccggcatcggccacggcggcgtctttggctggctcagaggcacccggggtgctgcaacccgccaatgcgagtgccgccaacaaagtaccgaatgatgcgagcttccaaggcatgaagcctcctatgataaaaaatggacagagatcgtgcgacagcgattgggcggattggtttcaagacgtaaaccgccgccgggcaagtttgcctgagtcgggacaggcattcgcccgctcaatcgtgaccggatatgaatgtgctcagtagatgtcgatgtagtcgaatgccggcttcggccagttttccttcagagcattgaagatctgtgtcacccagacttcatcactggcggcaacattacctacgtatccggagcccttggcccaggtctccaggcgaaacagcaggccgtcgatatccacgccacctacaacccttcctgaagagatataggcgattccggccttggtcacccgcaactgggcatgttcgtcgtcactggcactggcgagaagctggcgcacattcgccagtgtcaggttctcggggttgttcaaatcgatctgcacgtggtgtccccggcaattaaacaggcggacagtgtcgcacagcagtaacgtcatgccgaaccgccccatgcctaagtatcagtgccaaacgcaatgcaaaatgtttaactggccgggtaagaaccgcgttccagcgcattgccctgtattttcagccccgtgagaccttcatgaccaccgtaacgctccaagccgatatcaaagccaagtggccccaaggacaaagctcatacagccccggcagcccagaggaattggcgattatcggcatcgacctgctggtcaaggaactgggtacgcaggcagcgcaagcgttcatcggccagatattcgagaaatacccggccgatcacatgggggcacacgaccccgagcgcgaataagaaccggctggcgcacgccgaccggtcaacccattacttcagacgcgccaggcgctcggtcagcagatcgaagaagccctgggcatcaccgttctccacccagaacgcgttcttcggttgtttcaggccgtcgtaccagtcgacgatggtctggccgaaggttggaccttcacggctatccaccaccacattgacttcacgaccgctgaacagcgaaggcttgagcaggtaagccacgacggtggcgtcatgcaccgggccgccgggaatgccgtagtgctccatgtcgcccttgacgtattcattgagaatatcgccaaccaccttgctcgcgttgttcttgaggtcggcgatctttttcaggcgggcttcgctggtcagtaccttgtgggtcacgtccagcggcaggtaagtcagcttgacgccgctcttgagcacaatttcagccgcaaccgggtcggcgaacaggttgaactccgccaccggcgtgatattgccgccgttgaagtgcgcgccgcccatcacaacgacctccttgatgccctgggtgatttccggtgcctgggtcagcgccagcgccaggttggtctgcgggccgagcatcgcgatggtgatgctgtgcggcttggcagtgctgagggtcttgatcaggtaatcaaccgcattgccgtcagccaggccctttttcggctcatgcacggtgacgccggaaatgccttccttaccgtgaatattctcggcgtagatcggcgtgcgcagcagcggtgcgggcgcaccagcgtacaccgggatgtcctcgcgccccgcccactcacgggccaggcgtgcattgcgggaggtcttgtccaggcgcacgttgccggcgacggtggtgagcgcgcgaatgttcagctcatccggggaggccatggcgaacagcaatgcgaccacatcgtcagcacctggatcggtgtcgatgatcaggtcgattttttccgccgcctgggcgcttgcagcagtgagcgcagacaaaagcaggacactccggaacaggtttttcagggttggaagaccatattgcataaaacactccttgtcgttgagaacgctagaacgttacgccggacaccagcgcgatattgcagtagggctggcattcaccggtgcgcactaccgcgcgcgcgttgtgagtgagctgcttgaattcgtcatggctgaccagacgccgctcaccgatggccgcctgttctgtgagcgcattcagctcggccaaagccggtggttgcttgagcaggatttcttccgccagcacatggcgttcaacctgcatctcgctgagcacgatacgcaaggtgctgatgaaatccgggatgccctgggtcaacgccaggtcgatcagctcgacacccggcggcaccggcaggccagcgtcaccgatcacgaggatgtcaccatgcccaagcgaggcgatcacgcgcgacagggcaatattgagcagaggtgtctttttcatgagggcacaaaaccttgtacgtcgtgcagcgttggaatagagggttgcgcaccggcgcgggtgaccgacaacgccgccgcgacctggccaaaacgaatggcctcggcctcgctcttgccgttggccaacgccgccgcaaagccaccgacgaacgtatcacccgctgccgttgtgtctaccgccttgaccttgggcgcaagcaggtgctcgaaattcaggccgtcggtaaacagtgcgccctgggagcccaaggtaatgatgactttgccggcgcccgcctggatcaggtgggtggccgcagccttggcactgtcaatggagtcgacggccacaccactcagtgcggcagcttcgctttcattgggtatcaggtaatcaatcgaggcgtaccactcagccggcaacggcgcgctggccggtgcagggttgaggatcaccgtcttgcccagctcacgaccgcgcttgagggcatagcccaccgtattcatcggcacttccagctggcagacgatcacctcagccgcctgcagcaccgcatcaaacgcctgcaatgaggctggcgtcagttcgccgttactgcccgccacgatcacaatcgcgttctggctgctgtcatcgaccacgatcaaggccacgccactggaaccgtccacggtgctgacggcctggcaatcgatgccttccaccaccaacgcatcgcgcaactggatgccataggcatcgctgccgacacagccgatcatcgacacatcggcccccaagcgtgcggaggctaccgcctggttcgcacccttgccaccaggcacggttgagaatgtctggccgatcaaggtttcaccggcacggggcaaccggctggcacgggtgaccaggtccatgttcaagctgcctattaccactacttttgctggcatacatcagtactcatcaattcggttcagcggtattgggcgaacgtaccggagacaggtgccgtcgactcacgcaacacgatgctcggcgtcacgatgcgttgatcaatcggcatttggggtgttgcaattcttcgcagtaaaagttcggccgccgtctcgcccagttgcacgatcgactgcccgaccgtggtcagcgccgggtagacgtaacggctcatttgaatatcatcgaaaccgatcaccgacagctcacccggtacgcggatattgcgctctgccgctgcacgcaacacgccaaaaccaatcatgtcgttactggcaaaaatcgcactgggcgggttttgcgccagcaaatgcacagcggcggcataaccgcccgtgctggtgaaatcgctttcctgggtgcggttggcggccacctcgacaccggcctctcgcagcgcacggtgatagcccgccaaacgcatttgcgcgacacgggtatgggcagggccgccgatgcaagcaatgtcgcgatggcccagttcgagcaagtgccgggtcgccagataggcgccctcctcgtgatcgatacgcaccaggtccacatcaatgccatccagcgcccggtcgacaatcaccatgggcgtgcgcaccgcgctcaagccagcggcaaggccactgtcgtcaccgcccaccgaggtcacgatcaagccgtcgacgcgcttttccaacagcacgcgcaaatagttgcgttgcttttcagcattgtcgtcggagttgcagaggatcacgcagtagccgttacgctcgcagtaatcctcgatgccgcgagccaattccgcaaaatacgggttgaggctgttgggcaccagcaaaccgatcgtggccgtggtcttggccttgagtgagcgcgcgacggcactgggcacatagtcgagctgcttgatcgccgcttcaaccttgatgcgcaccggctcactgaccgggcgagtcttgttcaccacatgggacaccgtggtgtaggaaatacccgcaagcgctgccacatccttgatcgttgccataggtcagccccgccgactggcgcgctggctgcggtaggtgtcgaggaccacggcgatcacgattacggcaccggtgatgatgcgcttggtcggttccgtggccccgatctgcgccaggccagccgccagtaccgaaataatcaacacaccaaagaaggtactgatcaccgagccgcgcccgcccatcaggctggtgccgccgatcaccactgccgcaatcacttgcagctccaggccggaaccggcgttcgggtccgccgcttccaggcgcgaaatctggaacagcgccgccacgccggccagcaggcccatgaggctgaacaccaggatcttgtaaggttttggattgatccccgccaggcgcacagcctcttcgttggtgccgatgccgatcaggtagcgaccaaacacagtgcgggtgagcaccagctgcgcggcgatgattaccagcaacgcgatgatgaacgacggtgaaataccaaaggcaatcgggttggacagccaggcaaacgaatccccgatgtaagcggtgcgcgagccggtcatctggtatgcgacgcctcgggccatttccagcacgccgagggacacgatgaacgatggtatgcgccaggccacggtgatcgagccggtgatggtaccggccaacgccgcgcagcccatgcccagcacggcagccggcaacacgctccagccccagccgaggatcgctacgctgacggccgatgcagccagtgccagcaccgagcccaccgacaggtcgatcccaccgatgatcaggatgaaggtcatgcccaccgccagtaccatcaggtccggaatctggttggccagggtgctgaaggtgtcataggacaggaagtgatcgctgagcaccgagaacagcgcaatcatcgccagcaaggcacccgcaagacccaggtaggtgcccaggccatagaagttgccgccggtcttgccaggggaagttgtggttttcatggggtatccctaagcactgcgtcgttgagcagcgcatcacgtttctgatagccagcaaaggcggcggcgagcaattcgtcctgggtccagctgtcgcgctcgaaggtctcgatcaagcgcccggcggacaacacgccgatgcggtcgcagatcagcatgagttcacgcagatcactggacaccaccaccagcgctttgccctggcgggtcaattcgcccagcaaggcataaatatcgaacttggcacccacgtcgatgccgcgggttggctcatcgaacagcatcaccgagcagtcgcgctccagccagcggccaatcactaccttctgctggttaccgccggacagttcggaaaccaactgcgccggactggaactgcggatgcgcatggcgtcgatctgacgcttggccaaggcggtctcgtcgcggctgctgaccacgccaccgccggagatttccggcatgttgcccagggcaatgttggcgctgatggactgggtcagcagcaggccctcacccttgcggtcttcggtgatcagggcaataccgtggcccaccgcatccacgggcgagcggatgctcaccacctgggctggcgaaccaagcgccacggtgccgctgtcggccaggtcggcgccgaagatcaggcgcaacaactctgtacgaccggcacctatcaggccggagataccgtagatctcaccggcgcgcacttcaaaggacacgtcgcggaccttgtccgagcgagtcaggccttttaccgtcaaggccggaccaccaatggagcgcgggcccaggtcgatgtgctcgcccagctcacgaccgaccatcaaggtgaccagttgctcactgttgtaattggccatcggctcgacacagaccagtttgccgtcgcgcagtaccgcaatgcgctgggcaacacgggccagctcttccagccggtgcgaaatgtaaatgatcgccacgccccgggcctgcaagcgggtgatttgttcaaacagcatctcgacttcacgggccgtcagcatggccgtgggttcgtcaaggatcagtacgtggcagtcgccgatcaggttgcgggcgatttcgaccatttgctgatggccaatacccaggctgccaaccagcgtgtccggatcgatggcatccagcccgacctgggccatggcctcgattgcagccttgcgcagttgcttgcggctgatccagccacagtggctgggcaggttatccaggaacaggttttcggcaacagtcagtgtcggcagcaggttgagctcctgcatgaccatacgcacgcccaactcttcagcctgggtgcggctgccagggcgaaaatcctggccgttgaactgcatgtgcccggtagtcggcgtgaccagcccgccgatgatcttcgacaaggtacttttgcctgcgccgttctctccggtcagcgccagcacttccccgcgattgagcgtcagggtgatgtcggacagaaccggttgggcataggtcttgccgataccgctgaccgagaggacagcgttcggggcggaagatgacataggaaaatctccaggcgcccgcccaggacgagcgggcgctgttgggtgctgccaggattacttcttgaggacgagttcgaccggggtttcgatcacgccatctttggcatcgactttctcacccttgaccagcttgagcgcattctggataccgaacacggcttgctgggcagcagcctggtcagcggtcgccaggacacggccgtcctgcagcatcggcttgatggcttcgatgttgtcgtagcctacgaccagcaccttgccagccttgccggccgcgcgcacggcagagacggcgcccagggccatgttgtcgttaccggccagcagggccttgaggtcggggtattcactcagcatggcggatgccactttctgaccctggtcgatttcccagttgccggattgggtggagacgatcttcatgccggcagcgtccatcgcatccttgtagcctgcggtacgttgctgggcgttggtggtcgtcggaacaccctcgatgataccgaccttgtcacccgaggccagttgcttggccaggtagtcgccgaccagcttggagcctttgcggttgtccgggcctacgaaggggatgtcgaggttcttgcttttgagcacgtccgggtccaggcggttgtcgatgttgacgaccttgataccggcgtccgaagctttcttcagcacggtgacaagtgccttggagtcggcaggcgcgatgacgatggcgttgaccttggcgaggatcatctggttgacgatgtcgatctgcgcactggtatcggtttcgttcttgatcccgttggtgatcatgtcgaaatcggtggcgtgttctttctgatacgccttggcaccatcctgcatggtgacgaagaattcattggcaagggatttcatgaccaggccgaccttgggtttggcggcgtcatcggcaaatgcagaggagagaggcagggcagcagatgcagcagcaagcacagcgacagcaagaagacgtccagcgaatggcagcttcatgggttcactccgatcttatgattattgtgagcaacgcttgcaccgaagaccccttcggcagccttcccacccgggcggctgatacgagctgtcacgatactcaaggagtgctccgtgaaacatctcgcaaacgtttgcgttattcaaactatgagaaccttgtcgagatttgtcaacggttgaaaacagcctttcatccacgccctccctcccgcttgagcataggtgcagttaaacatcgcaccctctcggtcgctccttaaaacgacaggctggtgcgcatcattcatgcatcccccaaagcctggcggtcaactttttcggacaaccgaacacaatgcagtccgatgttcggaaagccggacacccacattatcaacaaacccgaaaaatcaatattaattgttataaatcaatcatttaaattgttttagcgatcacgctgagcctggtacagatcctgctctaccccatcacctcgtggcattcagaaccgcccgggtgttctagatgaacctgctacagcactcatcaaaaaccagagagaaaaataatgaaatctgcactgaagacttttgttccgggcgcgttagccctcctgctgttgttccccgttgccgcccaggcaaaggaagttgaaaccaagaccaaactgtccaacgtggtgatcctcgccaccggcggcaccattgctggcgccggtgccagcgcagccaacagcgccacctaccaggcagcgaaagtcggtatcgagcaattgatcgcgggtgttcctgagcttagccagatcgccaatgtgcgtggcgagcaagtgatgcaaattgcgtccgaaagcatcaacaatgaaaacctgctgcaactgggtcgccgcgtcgccgaactggccgacagcaaggacgtggacggcatcgtgatcacccacggtaccgacaccctggaagaaaccgcctacttcctgaacctggtggagaaaaccgacaagccaatcgtggtggtcggttccatgcgaccaggcaccgccatgtcggcggatggcatgctcaacctgtacaacgctgtggccgtggccggcagtaaggatgcacgcggcaaaggcgtgctggtcaccatgaacgacgagatccagtcgggtcgcgacgtcagcaagatgatcaatatcaagaccgaagcgttcaagagcccatggggcccactgggcatggtggttgaaggcaaatcctactggttccgcttgccggccaagcgtcacaccatgcattcggaattcgatatcaagaacatcaagagcctgccggacgtcgagatcgcctatggctacggcaacgtgagcgacactgcctacaaggccctggctcaagcaggcgccaaagccatcatccacgccggcactggcaacggctccgtgtcctcgaaagtcgtacctgccctggtggaactgcgcaagcagggtgtacagatcattcgctcttcccacgtgaatgccggcggcatggttctgcgcaacgccgaacagcctgacgacaaatacgactgggtcgctgcactcgacctgaacccgcagaaagcccgcatcctggccatggtcgccttgaccaagacccaagacagcaaagagctgcagcggatgttctgggaatactgattcctgactgcccccctgtaggagcgagtttgctcgctcctacaccctcacgctccgccctacatccaattgcctgaattgctgtaagacgaacttcttgaattttaagtagttgcgaaatcacctacagttaaatactgtatgtgcgtacagcttattaaggaatactccgtggcaaagtcctcttccgcagtgcccaccgcacctgatgcctacgaacgcctggctattcgcgtgcaaaagatcatcaattcaaccaacgcccagaaagccaaggcagcgttgatattccgtttgccggacgagcctgaggatgaatgggcgcgcttactggaggaaatcgcagagaacgacaatgtcaccctcgcctatcgtgacgacggtggcgtacagattttctgggttgtaccgaaggaagattgattcaatgattgtccgttttatcgcggtgtgctgcctgttttttgccgtcaccgcccacgcccaggcgccacgcacgttcagtgaagccaagaaaatcgcctggaagctctacgctccacaatccaccgagttctattgcggctgcaagtacacgggcaatcgcgtggacttgaaagcctgtggctacatcccccgcaaaaacgccaatcgtgccgcacgcatcgaatgggagcacattgttcccgcctggcagatcgggcatcagcgccaatgctggcaggacggtgggcgtaagaactgcacgcgccatgatgacgtgttcaagcgcgccgaagcggacctgcataacctggtgccaagcatcggcgaagtaaacggtgaccgtaataacttcagctttggctggctgccggtacaaagcgggcagtacgggtcttgcctgactcaagtggatttcaaggccaagaaggtcatgccgcgcccttccatccggggaatgatcgcccgcacctatttttatatgagcaaacagtacggcttgcgactgtcgaaacaggatcgccagttgtacgaagcctggaacaagacctacccggtgcaggcctgggagcgccagcgtaaccagacagtggcgtgtgtgatggggcgcggcaatgagtttgtcggcccggtgaatctgaaagcctgtagttgaaaatgggcgaaactcccgcccacccggcgcgttactgtgcagccttgtgctcgacaacctgcgattcagtatcggttttcttggcgcgcgccattttctcgttgagcagtgcttgcttggcctcggcttcagccttggtcgcgaacggccccagcaggacttcgtccttgccgtcaaccttcacgatgtaaaagttgaaaccatgttccagcaaccaggccgtaaggtcggtgatggcctgtagcttgtggtccggcggccctacccatacatcccattcctgggcagcaatcgcgccggtttgcggctgggtttcggtcacggcaggcttgctcctgggggcctcgacgcgtttgccctcaccgcaaccggccaatgccaacaccgccattgccatcgctactttacgcactgccctgctcctttaaagataaagaggcgactttatcattcactgtctattctggccgtcataaacgttggcttaaacaatgcgaatcatgtatcgcagacctgtatgatgccgccatgggaattaatgtcgcctctatgcgtcctaaaaagaggcagtcacagggaagcgcttagcagtaagctacacacatccgacacctgccctgtctgaaacatgtgtccttaaaagtaatcaaggagaagtccatgctgatactcacccgcaaagttggtgaaagcataaacatcggtgatgacatcacgatcaccatcctgggcgtcagcggccagcaagtacgaatcggcatcaacgcacccaaggatgttgccgtgcatcgcgaggaaatctaccagcgcatccaggccggtttgactgccccggacaaaaaccagacgccttgaagcgccctcagtagccagccctttcgtacactgtaatggctggcgaaaacctcttcacaccgctcttgtcattgctgcgtgactgacgccaccaatgcgttcatcttcatggaaagatgaaactgtcttcacgcccggaacttgttgtttcattctcagccgaatcttctgactgacactcagccatccgtgtgcattcaggagcacgtcgatgcggcccagacccccaccgccatttgcctacacgtcttggatgatcgccttatcgataggatgggtcttcgcagggctggcctatggtttgaagtatgcaatcgaaggctccggctccaccgcccctcgttcagggctggacttggcgctgctgctttgcgggtacttgttcctgttttgtctcaaacctatccagaagtccgtgcaacgcaggttgtgtcggcaaacgcttcagtgacatcgcgctcatcgccagtagacaccggcatcaacagcgtcacagcgcgagcttggccttttcgtatcagcccgcccccctctgcaagtacaacaagccgtccgcgtcacgctgtacgtctaactgctgatacccgtctatcgaaggatggtcagtggtcataggcgtgtgatgcgtcgacgtcacgaccatcacatccgcgcctgcggcctctcccgcacgaatacccaccgttgcatcttcaaacaccaggcattcatgcaccggcacacccaggcgttgcgcccccaaaacgtaacaagccggattcggtttgccgagggccacatcttcagccgtcaccaataccgccggcggcgcaatgcccgcggcttgcagtcgacgcaacgccaactcccttggagcagaagtgaccaacgcccattgatcacccggcaggcggttcagaaacgccacggcgccggaaatcgccacaacaccttcgacatcattgatttcagcctcggtgatccactgcgcttcaacctcaggatcgacgcccggcaaggcctggcgtgtgatggtgtcgatcgcgcgggcaccgtgaatagtcgtcaagaaagccgccacatccaggccatgacgttcagcccagatgctccacacccgctcggcagcggcaatggagttgagcaaggtcccatccatatcaaacaaaaaggcacggtaacggcgattgaacacggctgaacctcggatagacactgagcgaattcctcatgagcggaaaaatgataggcccgatgcaatctacggatcgccttggtgcttgtaaacgctaccgaggtcgattgcattacaggtttgtaatggagcggtaagccttaccagcaccctcacttcatacagtggagtcgtcagtcacccacaccggatgacgccacttcctactgatgaaaagggtccccccatgaagcctgcaagcaaactctgcctgatcgccgccagcctgctgatgctgggcacaggtaccgccatggccggcaccgtggcgccggtcaaagccaataacgtggtgctggtgcacggttcctgggctgacggctcaagttggtccgaggtgatcacccgcctccaggccgccggtctgcatgtcactgcagtacaaaacccgctgacctcggtggccgacgatgtcgccgccaccaaccgtgtactggcccagcaagacggccccactgttctggtcggccactcctacgccggcaccgtggtcagcgacgccggggccaacccgaaggtcagcgccctggtgtacgtggccgcacgcgcgccggacgccaatgaagactttgtcgcgctctcggcaaagtatccgagcatgccggtgcgggccggcgttgaagaccacgacggctacctcaccctgagccaggaggccttcctcaagtattttgccggcgatgtgccgcatgccaaggccctggagttgtacgccgtgcagcagcccatcaccaagaccctgttcagcggtcgcactgtcaacgccgcctggcacaccaagccttcctggtatgcggtgtcggcgaatgaccagaccatcaatccagacctggagcgcttcctcgccaagcgcatgaacgccaccaccatcgagctgccttcgagccacctgtcgctggtgtcccacgccaaggaaatcaccgacctgatcctcgaagcctccggccgccagccctgagccctgcattacaaacttgtcatcatcctgttggttggctgttcggggtgcctggttactgtgaactcaacgccacgatctggcagccaaccccttaagagagataccgccatgaaactgtttatcctcggctttgccgctctgctcgctaccggttccgtgtttgcaactgaacctgtgatccatgacaaaaccggcttcttcgtacacctggatgtggccaaagtgctgtcgagcaccgacacctacggccaatgcggcattgtcccggcgcgcctcgactacctggacagccagggtcgcgaacatgtgttggactaccaggtccagggcatcggttgcgccagtgacaattgatcgggctacacttgcgccacgcattgagacggggcacttcccatgaacattcttgtagtcgaagacgaacccaaggccggcaattacctgctcaacggcctgcaggaactgggttactccgtcagcctcgcccgtgatggcgtggacggtttgcaccaggccctggaaacaccgttcgacgtgatcgtgctggatgtgatgatgccgaaaatggacggctgggaagtgctgcgtcgcctgcgcaaggaagcggatacgccggtactttttctgacggctcgcgatgacattgccgaccgcatcaagggcttggagctaggtgccgatgattacctgatcaagcctttttccttcgctgaactggtggcacgcttgcgaaccctgacccgtcgcggcccaagccgcgaagaggaacaactgcagatcgccgacttgcaaatcgatgtgctcaagcgtcgcgtcacccgggcaggcacccgtatcaccctgaccaacaaagagttcgccttactgcacctgttcgcaactcatcaggaccaggtgctgtcccgttcgctgatcgcgtcgcgggtgtgggacatgaatttcgacagcgacaccaatgtggtggacgtcgctgtacgacgcctgcgcctgaaaatcgacgaccctttccagctcaagctgatccacagcgtgcgtggcatcggctaccgcttcgatacccaaccatgaacacacgccgtcactactccctgaccctgcgcctggcgctgatcttcgccctgctcgccttcgccctgctggcgaccctcggcgtggcgctgtatcgcgagttggagcgtgaactgatcatgcgtgacgacgcagccttgatctaccgcatcgatcaattgcgcaacctgctcaatgacagcaacaccctggacctgatcaagaccaagccggagttgttccagaacatgctcggcaaccgcgagtcagtgctgagcatcgccgcgccaggccagaagcccctgctgacggtcaaccccggcaatatcgacctgccagacgttccgccggtccccaagaaccacgaactgacgttcgccgacgtgcaccattttcccggcatcaatggggtaccctttgcaaccctggccgcgtccatcgactccggtgacctgggcagcctgcaagtcaccacggggcgcctgatgaccgaacgcaccgccgtactcgccagctatcgcttgagcgtttatatcctggcgagcattgctgcaattatcctggcagtggtcggttacctgctggttcatcgtgggctggtgccgttgcgccgcttggcccggcacgcccagggcattggtgtcggcaaccttgccgaacgcctcgacagccacggtgcgccgaaagaactgctgccgatgatagattcgttcaacaccatgcttgagcggctggccaagggctttgtgcaactgggccaggtgtccaccgacatggcccacgaactgcgcacgcccatcaacaatttgctgggggaaacccaggtcgccctgcaacagcaccgcagcattgaaagttaccagcagttgcttgcgtccaatgtcgaagagcttgaacgcctggcgcggatgctcgacaacatgctgttcctcgcgcgcaccgacccggcgagtgctttgcgtcaacgccaggaactcagtgccgtggatgaggtggaacgcatcgccgagtactttgagggcttggcgggtgatgtggatatcagcattcgtgccgaaggtgaaggcgtgatctgggcggagccgatgctgctgcgcagagccctggcaaatctgtgtgccaatgccatcaaatatggtgcaccgagtaccgagctggagatccgcgccgtgccaagcgccgagggcattcacctgagggtcagcaaccaaggagagaccatcgccgccgagcatctgccgcgcctgttcgaacggttttaccgagtggatgagtcacgggaacgttcggcgcagtccaacgggttggggttatcgattgtggcaaccatcatgcaactgcacaacggacggtacagcgtgagcagtgaggcaggcgtgacgtgttttgagttgttctttccgaaacgggaagattgagcgcaaacgcccggtgttattttgcaaaggtttgtctcttaaccgctcgacgcaagccaggctaattttgcttcccaatgggctcaaggtagagccggcagcggtaaaacaatggagattccaaaatggaaatgcgattaggcttactggaaaaggggctggctgaaatgaatgagaagctgatcaccgtttcgagcaaggcagacgccatggataagcacttcgcttccaaggcagacctggcaactactgaactgaaccttatcaaatggtacgtggcaaccgcattcgccatgacaggcctggcttgcgctatcaccttcgggcttactcgactgtttgcgatttgaggagcgtcgggccgatcagctgacctgcccgcccgcttcctctgcatccacccgtgtttgccacgccaccagcacagctgtctgcagccccgcaaccaacgtatccaacgccattgagggccgctgtgaatctgccacctgctctggcagaaaaggtacgtggataaacccactgcgtaccccagaacctgcgagcgcatgctgcaacaaataaaacacctggttacacacaaatgtcccagccgtctgcgataccgaggccgcgactcccgcctcacgcacggccttgaccatcgccttgatcggcaaggtcgtgaagtaggccgccgggccgccgtctacaactgccgtatcgataggttgctccccgaggttatcggggatgcgtgcatcattgacattgatcgccacccgctcgattgagatatcgctacgcccaggccccaggccagtcgcaattaccatcgccgggtgcaactcttcgatcagcccggccaggcacgggcccgctgtggcaaatgcgcaaggcagtcgacgcgcaacaatctgcacgtcgctgcccagctgcacgccgtccagttggcgcacggcttcccaggaggggttgaccgggtcttgatcaaagggctcgaaacccgtcagcagaactatttgcataacggcctcacatcaacaggtaaagcagcacaatattgaccaccagcatcatcaacgcggtcggcagctgagccttgatcaccgcgttcttgtccggcagctcgagcaatgccgccgggacgatattgaagttggcggccataggggtcatcagggtaccgcagtagccggagaacatgccgatcgccgccatcaccgccgggttaccaccatagatgccgaccagcaccggcacgccgacaccgccagtcatcaccgggaaagccgcgaagccattacccatgatcaccgtaaacaacgccatgcccaacacgtagaccatcaccgccaccaacttgtaatccaggttgatataagtggtggtgacatgcgcgacagccgtaccaaccccagcttcgttgaacagtaagcccagcattgccaacatctgcggcagcaccatggcccagcccagcgcttcagtcaggcgacgggattcacgcaaggcttgcaccggcgtatcgcgggtcaaccagcacgccaggccaagggcgatcaggcagccgataccaagggagacaaaggtggtgtttttcgggtccagcaacggcactccgccaatctcggtgtgcttgagcaataccgagccgatcaccgtggtcagcggaatcgccaacgccgggatgaacagcttgtgccccaggcgacccgcactggcacgggatgccttgtcgtgcaactcggcatgcttgccacggccgacgccgcccatgccggcaatcaaggccatgaccactatgcctaccccgatagccaccgaaggcagacgctcaccgatcaggaatggaatggcgaacaacagccagaacaatgcactggaccaacgcttgggatgggtgcggtccatcaggatcatgcaagccgtgatcagcagcaggaccccggccagccagtacaggtattgaatggaaataatcattgtgcagcctccacggatgcagctgccggcgtcatctctcgggtgagcctgcggtcaaaccgatgcaggcggatcgcgtgaatgatgaaggcgcagatcgcggtaggaatcccccacaccgcaatatgcagcggctccacatcaatccccgaccccagcaggaaggtatgcatcaaggcgattgcaccaaaggcgacaaagatatcctcaccaaaaaacaggccgacattgtcagtcgccgcgcacatcgccagcactttatgacgcagtttgtcaggaagtttgccgtagcgtttttccgctgcaccctcagccatcggcgccagcaacggacgcaccatctgcggatgcccgcccaggctggtcaggcccatggcagccgtggattcacgcacaaacaaatagatgatcaacaaacgcccgaccgtggcgcgctcgaaccgtgcaatccagttctgcgcatgcaggcgcaacccatggcgctccaacaggccaatgaccgccagaggcagcaacagaatcaattgcagggcacgggtctgaaggaagccatcgcccatggtggcgaggattttttccaggggaaaatgggcggcaagcccggtagcgatagcggccgcggtgaccaccaacagagggttgatgcgcaaaacaaagccaaccacgatcacaagtacgccgatcaacggccataagttcacaacagtttgcatggcggtgaggtccttaagtgcgcgctgcggcgccattacagcaggatgtgaacaaagggttcacagcaggaagtggcgtgcagtcggctcggttttttattgttgacccggaaggtcgagcgtcagtggcggcaactttgctgcctggggacgggaggtgtccaacaagaaaaattgttgctgcgaaccaataaattttgtgggtgattgcacagcatgcatgtaacgagatgtggacagacccgcagggattcgcgcatcttagcgccgcctgtcttatcaggcgtgcacctcaaatcagcacactcttcccgattactgttgtggatatggaaattcaatgaaaacccaaaaggtcctgatcgccctctcctgcgcagttgcgctgtccatgctgggtggttgcgccgccaaggtaaaaagtggcggcagcgcagcgctggcgatcccggactccgcgaaacacaacctcgtggtcagcatcaagggcgaaggccaggtcgagcaaaacccggactggaacctgctcaagcgtgactggaacaacgcgctgcaagtggaggcccgccaggccggtttcaacgtcactgaaagccctgcagtggttccgagtggtgaagaaggtgtcggcatcaagatcaatgtgagcaagtttcgctacatcgagccgggctcacggtatgtagccggcgcgctggtaggtaacgcctgggtgttctcccgcgcagattactcggacctcaaatccggcacgccgattggctcgcgcacctacgacacctcgtcatccgcctgggaaggcattgcctcggccatgacgcagaagcaggtgcaggcgattgccaaacagatgatcagcgatatcaagaacgccaaagccaagtaagccgccatcgtgagcgagtttctcgaattcatctggaagctgcttgagttcgcaggcgactacaccccaccacggcgaaaacgcgtgttctcactcgggttcgtgatgtttttgctgctggtggcggttgttgaactggtgttgctgcagatttttcttggagatacgggctgaagagagggtttgcaaaagttttgcaaatcgcaggcaacaaaaaagggcccacctttcggtgagcccttctagaccgcccagcagagcggattttgtttggtaggcgcgattggactcgaaccaacgacccccaccatgtcaaggtggtgctctaaccaactgagctacgtgcctgctgtgaggcggcattctacggaattccggaggggtgtcaacatcttttttgcagctaaccctatgaatatgcgaattttttatttacgcggggcacacccgcggatttcgggtggctggcaggcaattttcaactcaggtaggatcggcgcactcgtaaaaaatataaaacagaggttccaggatggcgaacaccccctatccccagtcgtattacgccgcttccgcgaatgccgttccccctcgcccggtcctgcaaggcgaagtcgaaaccgatgtgtgcgtgatcggcgcaggctacaccggcctctccagtgcgctgttcctgctggagaacggttttcgcgtaacggtgctggaagccgccaaggtgggttttggcgcctcgggccgtaacggcgggcagatcgtcaacagctacagccgggatatcgatgtgatcgagcgcagcgttgggcccaagcaggcgcaactgctggggcagatggcgttcgagggcggcaagattatccgtgagcgcgtggccaagtatcagattcagtgcgacctgaaggacggcggtgtattcgccgcgctcaacagcaagcatatgggccacctggagtcgcagaagcgcctgtgggagcgctacggccacactcaactggagctgctggacgaacgccgtattcgcgaagtagtggcctgtgacaactacgtcggcggcctgctggacatgagcggtgggcacatccacccgctcaatctggcactcggcgaagcggccgccgtggagtccctgggcggtacgatctacgagcaatccgctgccgtgcgtatcgagcgcggcgccaacccggtggtgcataccgccgagggcaaggtcagggccaagttcatcatcgtcgcggggaatgcctacctgggcaacctagtgccggagttggccgccaagtcgatgccgtgcggcacgcaagtaatcaccaccgcccccttgggcgacgagctggcgaaaactttgctgccgcaggattactgcgtcgaagactgcaactacctgctcgactactaccgcctcaccaacgacaagcgcctgatcttcggcggcggcgtggtgtatggcgcacgcgacccggcaaacatcgaagcgatcatccgcccgaagatgctcaaggccttcccacagctcaaagacgtgaagattgactacgcttggaccggaaacttcctgctgaccctgtcgcgcttgccgcaggtaggtcgcctgggcgacaacatctactactcacagggctgcagcggccatggcgtgacgtatacgcacctggcgggcaaggtactggcggaggcactgcgaggccaggcagagcgttttgacgcgtttgccgacctgccacactacccgttcccgggcgggcaactgttgcgcacaccgtttgcggcaatgggcgcctggtactatgggctacgcgacaaattgggattctgactcgaacctgcaggagctcgtttgcgggctcctccaggttgcattatcaaatcgcagacacaaaaaaccccggtctttcgaccagggtctttgctatcggatcaaagtagccagaggcttgctttgtgctccaaggcgttcagtgggccttgaggcagatatggcgcagcggacgggactcgaacccgcgacccccggcgtgacaggccggtattctaaccgactgaactaccgctgcgtatcgcttgaccggttgatcgtaaaccctcaaccgtctttaaacatctgattgatcagccttggctgttcaatctcaagtccgacacatcgaacctggataatatggcgcagcggacgggactcgaacccgcgacccccggcgtgacaggccggtattctaaccgactgaactaccgctgcgcgtcggtgcaacctttaacgttgcgtcttgccctgaagcaaaactctcaagaagtggtgggtgatgacgggatcgaaccgccgaccctctgcttgtaaggcagatgctctcccagctgagctaatcaccctttgcttcgttgaggccgcgaaatttacgcaggtagcagacctaagtcaatagcctgcttgaagtttttctgaaaaagacaaaattgcttcaagacggctatccgccctactcgctgtaaatcatcttcttgctcatgccaccgtccacgacaaactcttgcccggtgacaaaccccgcctggcgcgacagcagccatgccaccatcgccgccacatcttccacggtccccaccctacccgccggatgctgggcgtgatcggcgtcactcaacggctcggcacgccgggccgccgggtcacgcgcatcgatccagccggggctgaccgcattgacccgcacttccggccccaggctcatcgccagggcgtgcgtcagggccagcaggccacccttgctcgccgcataggcctcggtgtccggctccgactggcgagcccgggtcgacgccaggttgacgatggcgccgccgtgggcacgcagatacggcgcacagtgcttggccaacaacatcggcccactgaggttcaccgccagcacccgattccagtacgccaggtccaggctttccagcgtgatgttacgcgggtcggccaccgccgcgttgcagaccaacgcgtccaggcgcccaaactgccccaacacctcggcaacaccctgggcgacttgcttctcgtcggccacatccatgctgataaaccaggcgttgtctcccagtaccttggacaccttggaaccgcgctcgcggtccaggtcggtcaacaccacctgccaaccttcgctgatcagccacgcggcaatcccgaggccaatgccgcgcgcagcacccgtcaccagcgcgacacgcccgttactggccgctgccgcttccatggaccactcgatcacaaggccgccagcccgcgagccaggtcagcttgcaagtcagccacgtcttccaggcctaccgcgatgcggatcaggctgtcacggatacccgctgcctcacgctcctgcggcgccaggcgaccgtgggaggtggtgctcgggtgggtaatggtggtcttgctgtcacccaggttggcagtgatggagatcaggcgtgtcgcatcgataaagcgccaggcgccctctttgccgccctttacttcaaagctaaccacagcaccgaaaccacgctgctgacgctgagccaattcgtgttgtgggtggctcttgagaccggcgtagtgcaccttctcgataccgtcctgttgctccagccactcggccagggcctgggcgttggcacaatgggccttcatgcgcaggctcagggtttccaggcctttgaggaagatccaggcgttgaacgggctcaaggtcgggccagcggtgcgcaggaagccgacaacttccttcatctgttcgctgcgccccgcaaccacaccgcccatgcagcggccctggccgtcgatgaacttggtggccgagtgcacaacgatatccgcgcccagcttcaacggctgttgcagcgccggggtgcagaagcagttgtcgaccaccagcattgcgcccttggcgtgcgccacttcggacaacgccgcgatatccaccagttcggccagtgggttggacggcgactcgacgaacagcagcctggtgttgaccttgatcgccgcatcccagccggacaggtccgccaggggcacgtagtccacttcaatgccgaagcgcttgaagtacttctcgaacaggctaatggtcgaaccgaacacgctgcgcgacaccagcacatggtcgccagcgctgcacaggctcatcaccaccgccaggatggctgccatgccggtcgccgttgcaaccgcctgctcagcgccttccagcgccgcgatacgctcttcgaacgcacgcacggtcgggttggtgtaacgcgaatagacgttgcccggcacttcgccggcaaagcgcgcagcggcatcagccgcagtacggaacacgtagctggaggtgaagaacatcggatcaccgtgctcaccttccggggtgcggtgctggccggcgcgcacagccagggtatcgaaagctacgccatcgaggtcgctgtccaaccgaccggcatcccattcctgactcatgctgccactccttactcgattctttatttaagatacaaaaccggcccctcagggccggttgtcactcagttgttgtacaggtcgatgatcgcgctgaccgcctgggtcttgatcttcgacgagtcgttgcgcgcctgctcgatcttgttcaggtaggcctcgtcaacgtcgccggtcacgtacttgccgtcgaataccgcgcagtcgaactgctcgatcttgatcttgccaccgccgaccgcctcgatcaggtctggcaggtcctggtagatcaaccagtcggcgccgatcaggtcggccacgtcctgtgtcgaacggttgtgcgcgatcagctcgtgggcgctcggcatgtcgatgccgtacacgttcgggtaacgcacggcaggcgctgcggaacagaagtagacgttcttcgcaccggcttcgcgggccatctggatgatctgcttgcaggtggtgccacgcacgatggagtcatccaccagcatcacgttcttgccgcggaactccagctcgatggcgttgagcttctggcgtaccgacttcttgcgcgccgcctggcccggcatgatgaacgtgcggccaatgtagcggttcttcacgaagccttcgcggaacttgacgcccaggtggttggccagctccagcgcagcggtacggctggtgtccgggatcgggatcaccacgtcgatatcatgctcgggacgctcgcgcaggatcttctcggccagcttctcgcccatgcgcaggcgtgccttgtagaccgaaacgccgtcgatgatcgaatccggacgcgccaggtagacgtgttcgaagatgcacggggtgagtttcggtgccacagcgcactggcgggtgtgcagcttgccgtcttcggtgatgtacaccgcttcgcccggcgcgaggtcgcggatcagggtaaagcccagcacgtccagggacacgctttcggaagcgatcatgtactcgacgccttcgtcggtgtgacgctggccgaacacgatcgggcgaatgccgtgcgggtcacggaaaccgacgatgccatagccggtgaccatggccactaccgcgtaaccaccgacgcaacggttatgcacgtcagtcacggcggcaaatacgtcttcttcggtcggctgcagcttgccgcgctgggccagctcgtgggcgaacacgttgagcagcacttccgagtcggagctggtgttgacgtggcgcaggtcagattcgtaaatctccttggccagttgttcaacgttggtcaggttgccgttgtgcgccagggtaatgccgtaaggcgagttgacgtagaacggttgagcttcggccgaagtcgagctaccggcagtcggataacgcacatggccaatacccatgtgcccgaccaggcgctgcatgtgacgctgatggaacacgtcacgtaccaggccattgtccttgcgcaggaataaccggccgtcgtggctggtcacaataccggcagcgtcctggccgcggtgctggaggacggttagcgcgtcatacagcgcctgattgacgttcgacttaccgacgataccgacgatgccacacatgcgacgcaacccctacttaatgaatcttgactgaacacaacttactgaggcgttttggccggcaagaggtgttccttgaacggaagatcagcgggtacgctgattccgctggccagccactgactgctccaccccagaatgaggttcttggaccagtctgcaaccaatagaaattttggcacgagtaccgactcctgccaccacgaatcctgctgtaccggccccaggctcaacagcccgaccgccacgaccaccagcaacgcgccacgcgcggcaccgaaggccatgccgagaaatcgatcggtcccggagaggccggtgacacgtatcaactcgccaataagataattgaccattgcccccaccagcagcgtggcgatgaacatgatggcgcagcccgcgatgacgcgagccgaaggtgtctcgatgtatccagccaggtagaccgacaatgaaccaccgaacatccaggctacgactcctgcgatgatccaagtcagcaacgacagtgcttccttaacgaagccgcggcttagactgatcaaagcggagatggcgacgattgcaacaatcgcccaatcaacccaggtaaatggcacgttgtagcctacggacagatgaggcggcgcattttagcagagcgtcgggctgtcggtaagctgtgattgtggctgccttgcaaatcagtagtttgggacgagtgaatccaatttcaagcacaccccgaaacaactgtgggaggggtaatccccctcccacacttgaccgcatttcaaactcaagccgctgcgaaatcaaccgcgctcaggctggaaccgggtcacgaaacccttgaggttctgctggcgatccagcaaatcgcgcaggcgatccgcctcggcacgctcgatcagcggcccgataaacacccggttcttgccatcggcactacggatataggcattgtagccttggctacgcagcttcttctgcaacgcgtcggccccctcgcggttacccagactggccacctggatcgaccaactgaccggcaagccattcggatcgatgcggctctggccgacgtccggcttgcctggcgcggcaggctgcggcgcaaccggcttgggcgcaggtgcgggcgcagcaggcttggccgctacagtcggcgcaggcgccggcttcaccaccggcacacttggctgtaccggcatcgacggtgcctgctgtgcagccacctcatcattggtcggcacgggctcgtcctcgggtaacgcctggggctcaggcaccaccaccggctgaacctgcacctgaggcactgcaggcgcctgcggcgaggccggtgcctcgacaacgacctgacgctcttcatcctggcgggaaaacagcatcggcaggaagatcaccgccaatgccaccagcaccagggcaccgaccattcgctgcttgtatgcgctatccagtaatgccatgtgcagcttcctccgtggagcgccgggccaaccactcaagcgcctcggcaacacaataaaatgacccgaacaacagaatctcatcgtcgggcgtggcaatggcgcactgtgcttcaagggcatcggtgacgcttgcatacgacgtcacgggcgcagcaaggttctgcaaggccacttccagctcggcggccgggcggctgcgcggcgtatccagcggcgcaacagcccaggcctggacacgacccagcaagggcgcgaccacaccgtccaggtccttgtcggccagcaggccgaatacggcaaggcgttggccgaccggcggcgtgcgtgataggcgttgcgccaggtactcggccgcatgggggttatgccccacatccagcagcaggttcagccgcttgccctgccattcgaattcacgacggtccagacgtccgacgacgcgagtcgccagcaaggtggccgagatctgctcgacattccacggcagatccagcagcagataggcttgcagcgcgagcgcggcgttttccatcggcaggttcagcaacggcaaatcgcgcagttctacggcctggccacgcgcatcgcgcccacaccattgccagtgctgatcaccgatctcaaggttgaattcgcggccccgcaggaaaaacgggcaatccagctcacgcaccttgtccagcaaggtgtacggcgggtcaatgtcaccacacagcgcaggcttgccctggcggaagatcccggccttttcataggccacggactcacgggtattgcccaggtagtcggcgtgatccaccccaatactggtgaccaacgccaaatcggcgtccaccacgttgaccgtgtccaggcgcccacccaggccgacttcaagtaccaccacatccagttgcgcacgctcgaacagccagaacgccgccagggtgcccatctcgaagtaagtcagggagatctcgccccggcccgcatcgagtgcggcgaaggcttcgcagagttgctcgtcggtggcttcgacaccattgagctgcacccgctcgttgtaacgcagcaggtgcggggaattatagacgccgactttcagcccctgggcctgcagcagcgccgcgacaaaggcgcaggtagagcctttgccgttggtaccggtcaccgtgatcacgcgcggcgccgggcggcccaacccgaggcgggccgctacctgttgcgagcgctccaggcccatgtcgatggcggacggatgcaactgctcaaggtaggcgagccattcgcccagggtacgttgggtcataggtttgcaggcaccggcggtacgacgatcggctcgactttaggcgcgacgtacaccggggtcggcaggcccatcatttgcgccagcaggttacccaggcgtggacgcaactcaccgcgcgggatgatcaggtcgatcgcgccgtgctccagcaggaactcgctacgctggaaaccttccggcagtttttcacgcacggtctgctcgatcacgcgaggaccggcaaagccgatcagcgccttgggctcgccgacgatcacatcacccagcatggccaggctggcggatacgccaccgtagaccgggtcggtcagcacggagatgaacgggatgccttcttcacgcagacgcgccagcaccgcagaggtcttggccatttgcatcagggagatcagggcttcctgcatgcgcgcaccaccggaggcagcgaagcagatcatcgggcagcggttttccagcgcgtagttggcggcgcgaacaaagcgctcaccgacaatggcacccatggagccgcccatgaaggagaactcgaacgccgacaccacgactggcatgcccagcaatttgccgctgacggagatcagcgcgtctttctcaccggtctgcttctgcgcggcaaccaggcggtccttgtacttcttgccatcgcggaacttcagacggtcaaccggctccaggtcggcgcccagttcgttacggccttcggcgtccaggaagatgtcgatgcgggcgcgggcgccgatacgcatgtggtggttgcacttggggcaaacgtccagggtcttttccagctccgggcggtacaacaccgcgtcgcaggatgggcacttatgccacagaccttcaggaaccgagcttttcttcacctcggaacgcatgatcgaagggatcagtttgtctactaaccagttgctcatgctttctttctccagtaccggtggcttgaacacagccccgcgtatgcccttgagctaaattcatatgtggcgatgacacaggctggacggggtcagacgttcgaccggccttttcctgcctgtatcctcagccttccagacaacctgccagcgcagggttgccacttcgtttccgggccaccacaggcggcgccgggctgttttacacagtggtagttatggacggcggcagactgccagccgtcacattgcaccactgctgttgcgcacggcctgcatgaatgcgcgaatcttgctgtgatccttgatgcccttgccctgctccaccccgccgctgacatccacggcatacggccgcacctgctcgattgccgccccgacattcgcggggttgagcccgccggccaggatgatcggcttgctcaagccagcgggaatcagcgaccagtcgaacgcttcgccggtaccgccgggtacgccttcgacataggtgtccagcagaatcccgcgagcaccaccgtaggcggcacacgccgccgcgatatcatccccggccttgacgcgcagcgccttgatgtagggacgctgataactttcacattcgtcaggcgtttcgtcgccgtggaactgcaacatgtccaagggtacggcatccagggtttcgttgagttcgcagcggctggcgtcgacgaacaaacccacggtggtcacgaatggcggcaaagccgcgatgatcgcccgcgcctgcaccacattcaccgcccgcgggctcttggcataaaacacgaaaccgatggcatccgcccctgcctcgaccgccgccagcgcgtcttctatgcgggtaatcccgcaaatcttgctgcgaacggctgacatgtcgtgaaaactccagggttggaccgagaaagtcccggatggtaacaaaagctattccgggcgtcagccgccaagttcgctgaaacctgtgaggaagtgtggcccgatgaagcgctccggcaactcgaactcgtcgcggtactccacatccaccaggtacaggccgaacggatgtgccgtgaccccacccgtgcgacgaacgcggctttccagcacttccttggcccactccaccgggcgctcgccggtaccaatggtcatcagcaccccggcgatgttgcgcaccatgtgatgcaggaaggccccggcgcggatatccagcacgatcatcttgccgtggcgggttacccgcaggtggtggacttccttgatcggcgacttggcctggcactggccggcacggaaggcgctgaaatcatgcacacccaccaggtgctgcgcggcctcggccatgcgctcggcatccagcgggcggtggttccaggtgatttcttcgttgaggtgcgccgggcggatctggtcgttgtagatcacatagcgatagcgccgggcgatggccttgaaacgcgcatgaaagtgcgctggcatgaccttggcccaactgacgctgacgtcatggggcaaattgatattggcgcccatcacccaggccttcattgaccgctcagcctgagtatcgaagtgcaccacctggccacacgcatgcacaccggcgtcggtacgcccggcgcacatcagcgaaaccggtgaattggcgactttcgacagggcattttccagggtttcctgcaccgtcagcacgccggatgcctggcgctgccagccgcgatagcgcgagcccttgtattccacgcccaaggcgatgcggtaaaagcctgcggccgccatttcggcggtcgggttatctatatttgccaagaactgagagcctgatgagttgcgcaaaggcggccattatgccggtttgcaggggagcccacaaaagcaaaacggcgacccgaaggtcgccgctgtttgaacaacgggctgttacgccaaccggccgagcatttccttggcctcgccgcgttgaacctcatcgccttcggtcaacacttcggaaaggatatcccgcgcgccgtccgcatcccccatgtcgatataggcctgggcgaggtcgagcttggtggccacctcatccgtgccggagaggaagtcgaattccggctcatcatcgcccagcgccgcgtcttctgcggtaaaggacggctcaatggacggatgctccaggctctgggacaggcgatccagctcggcgttgacatcatccagctccgacgtgaaagcatcgggcttggcggcggcttccggctcatcagccagggacaggtcgaaatcttccggcaaatcgaagtcatccagcgccgcaggcgtgagggtcggcggctcgacggccggcacgtccttcatctgttcgtccaggcccgaaaggaagtcgtcatcggattgcgccgaagccggggcatccagttgcaggtccagatcgaagtccgacaggtcatccgggctggccttggcttcggtctgctgctgcagcagcgactcgaacgtctgctgatcgcccttgacctcggccggggacgcctgctcaagctcgtcgaggctcagatcgaaatcagtgtcaaagacctccggctgcgcaggcgcaggtttgtcttcgagcaaatccttgacgtactgagcgtccagggcagctgcagccacggcggcgctgacacccgccgccaacaccgccatggccgggaagcgactcttgagctgttcgacctgggcatggttttcaccattggccaccagttgacgctcctgggtcacaaagccgtccttgtcgttttgcaggccgtagacttccatcagcttcaagcgcaggtcgctgcgcttgggctcatgcttgatcgcttgctccagtacgtcggctgcctggttcaggtgaccacggtcgatatgggactgggcttgggccagcgcatcgtttgagttcaccggagccacggcaaccgccagcggcgccagtacggaagcaacggtcggcacaacaaccgccggttcaaccaccggagccggggccggtgcggcggccagctttacgctgggcggcggcgtctccagaccttcgaagctgctcggcggcaggtcgtcatggaggttcgaggtgaactccggttcttcagccagggcccgcgccatgcgcaggtgtttttcctcttcgcggcgcgcattgcgatggcgcgcccacaacagcaggagcaacaacaccagtaaacccgccgcaccgccgatcacgccgagcacgatcgggttggtgagcaggtcattgaatttgccgtcggcgctggccggtgccgcgtccgccttgaccggctcaggcgctggcgcgacgggtgcaggggtgacggcctcgggcgtagcaggtgcagtggatggctcgcctgccaactgggcaggcattgctgcagtcgccggagcagccgggacacccttttcagcctgcaaacgcgccagttgatcgtttttcagttgaatcagtttttgcagcttgtccaactggctttgcaggtctgccgcgcggcttttcagctcttcgttgtcgcgtcgggtggtgtccagttgctcctgggtcatcgccaacttgtcgctgagtgccgcgctgtcgcccgccttgcccttggcgcccttcttggcggcttcggccgacaccaggctcaagttgtccttggcgttggtgcttgcaggcgcgttgcctgcctgggtgcgcttggtggcgtccagttgctgtttgcccgctgccgggttggtggcggcgcgtcgaccctggcgccaggcggcattttgcgcgctcacctcagcaattgcctggggttgcggcagcgcagtgctttgtacggcgtccggcaggcgcaggacctggccggttttcagacggttgatattgccgtcgatgaacgcattcgggttcagcgcctggatcgccagcatggtttgctgcacggagccaccattgcggtgcttctcggcgatttcccagagggtgtcgcgggacgtggtggtgtgctgtgccggtttgctcgcggcaggcgcggtgctggccggtgcggccagacgcggcgcaggcgcggcggtcgtcggtgccggctggtcgaacttggccgggtcgagcaacacgctgtagtcacgcatcagacggccattcggccattgcacctgcaacaggaaacgtacgtaggagtccggcaacggcttgctggaggtaacacgcaccacgctgcggccattggggttgatcaccggggtgaacgtcaggtcactgagaaacgcctggcgatcgacgccggcgtccacaaatgcctggtcagaagccaggcttggcgtgatctcggtagcggtgaggccaccgacatcgagcaattcgatttccaccgccaacggctggttcaacttcgacttgagggtcatctcccccagctgcagcgcctgcgccataccggaggacagcgccgaggcggccgctattgctaacaccagtttgcgaacttgaaccatagcctcatcctttgtttgaacactccccggcctgcgagaaggttggtaaccgctgccataaggcatggcgagccgataggtcaccgacgcgcaacttttcctgcctggggccaagcatagcgcctggctagaatcaatctacaaattgccgccaagtatcttttacgcaaggccttttatcaacaactgcgccagctgtactgcattcagtgcggcgcctttgcgtacgttatctgacgtcagccacagatttagttccgccgggtcatccacacctgcccggacgcgaccgacgtagaccacatcctggcccactgcatcgccgacggctgtaggaaaatccccttcatctacgagctcgatgctcggcgcagcctcaagtgcgcggttcaccgcagccagatcgaccgccgcgcccagttgcaaggacactgtcaggctatcgccaaaaaacaccggggcttgaacgcaggttgcggaaatctttagcaaaggtaattccagcactgcgcgcaactcgtggaccaggcgtttttccagggccgtatgcccctgagcatctggcgtgccaacctgcgccaacaggttgaaggcgacctgccgatcaaagaacttcggctccagcgggcgcatattcagcagctcggcggtttgccgggccagttcgctgacggcttcacgcccctgggccgacatcgccaggctggcggtgacgctcacccgctggatatccagcaagccccgcaaaggcgccagcaccaccgccaggttggtcgccgacgggctcgggctgccgagctggaacggcttcttcagaccttccagcacgtgggcattggcctccggcaccacctgcggcgcctgctcggccggcaacgcaccggataagtcgatcaccgagcaccccgccgccgtggcacgcggcgcaaaactcagggtgacagccggccccgccgcaaagaacgccagctgcgccttgctgaagtcaaattcgtcgacttccttgacccgcacattcttgccgcgaaagggcacggaggcgccggccgagttgttgcccgccagcaaatacagggtgcctaccggaaaatccagctcttcgaggatctgcaccagggtttcaccgacggtgccggtggcgccgatcacggcgatttcaaaggtctgggtcatgggggctgcctcgggcattgcggggggagcggcactttaccgggtgactgggggtgaggcaattaagctgggatttgtggtggggctgatggccttatcgggggcaagccccctcccacactcgaacgggttcacaggtcaaaatgtgggagggggcttgcccccgatgaagcccgaccaaacaacaaaaaacccgcgcctgtcatcagaacgcgggtttctctcattgccttacgcgatcaacgctccagcaaaatccgcaacatgcgacgcaacggctcggccgcgccccacagcagctggtcgcccacggtgaatgcaccgaggaactggctgcccatgttcaatttgcgcagacggcccaccggcacattcagggtgccggtgaccttggtcgggctcagctcctgcatgctgatatcacggttgttcggcaccagcttgacccaggggttgtgctggctgatcaaggcttcgatatcgctgatcggcacgtctttgttcagcttgatggtcaacgcctggctgtggcagcgcatcgcgccgatacgcacgcagatgccgtcaaccgggatcgggctcttgaagcggccgaggatcttgttggtctcggcctgggccttccactcttcgcggctctggccgttcggcagttccttgtcgatccatgggatcaggctaccggccaacggcacgccgaagttttcggtcgggtaggcatcgctgcgcatggcttcggccacgcggcggtcgatgtcgaggatcgcgctggccgggtcggccagttgatcggcgaccgcggcgtgggtcgcacccatctgcttgatcagctcacgcatgttctgcgcgccggccccagaggccgcctgataggtcatggcactcatccactcgaccaggccagcttcgaacaagccgcccaggcccatcagcatcaggctgacggtgcagttgccgccgacgtagttcttggtaccggcatccaactgctggtcgatgaccttgcggttgaccgggtcgaggatgatcaccgcgtcatcctgcatgcgcaggctcgacgcggcgtcgatccagtagccctgccagccggcttcgcgcagcttggggaagacttcgctggtgtagtcgccaccctgacaggtcagaatcacgtcgagggttttcagctcttcaatgttgtaggcgtccttgagcggagcaatatccttgcccacggacggcccctggccacccacattcgaagtggtgaaaaacaccggctcaataagatcgaaatcctgctcttccagcatccgctgcatgagcacggaaccgaccataccgcgccaaccgatcagacctacacgtttcatcgcaactacaccttgttaaaaagtgggccgccttgcagcaacaactgcaagcgggcccgagagattacagattccgcagcgcggcgactactgcgtcgcccatttcttgcgtaccgaccttggtgcaaccctgcgaccagatgtcgccggtgcgcaaaccctgatccagcaccaggctcacggcctgctcgatggcatccgccgcatcgctcaaattgaagctgtaacgcagcatcatcgacaccgacaaaatggtcgccagcgggttggcaatgccctggcccgcgatgtccggcgccgaaccgtggcacggctcgtacatgcccttgttattggtgtccagggacgccgacggcagcatgccgatggaaccggtgagcatcgacgcctggtcggacaggatgtcgccgaacaggttgtcggtgacgatcacgtcgaactgcttcggcgcgcgcaccagctgcatggcggcgttgtcgacgtacatgtggctcagttcgacgtcggggtagtccttggccacttcctcgacgatttcgcgccacagctggctggaggccagcacgttggctttatccaccgagcagaccttcttgccacgcacgcgggccatgtcgaagccgacacgggcgatacggcggatttcgctctcgctgtacggcaaggtgtcgtaggcctggcgctcgccattttccagctcgcgtacaccgcgtggcgagccgaagtagataccgccggtcagctcacgcacgatcaggatatccaggcccgccaccacttccggcttgaggctcgaggcgtcggccagttgcgggtagaggatcgccgggcgcaggttgccgaacaggctcagttgcgcgcggattttcagcaggccgcgctcagggcggatgtcacgttcgatcttgtcccacttcgggccacccactgcgccgagcagcacggcgtcggccgcgcgggcgcggtccagggtctcgtcggccagcggtacgccgtgcttgtcgatggcggcgccgccgatcacgtcgtggctcagttcaaagcccaggctgtacttgctgttggccagttccagcaccttgaccgcttcggccatgatttccggaccaatgccgtcgccagggagaatcagaatctgcttgctcatgggttcctcatttcatcaagcgacccgcccgtgggcaggtcgggaaaaatcaatcagcgttcggcaaacaccaccagcacgtcggtgctgaaggtgccgtcggcttgaatttcgtaataatcacgcacttcctggcccatcgccttttgcagctcaaggatcgcggcgcgcaggacctgcggcgtgcgcatgcgctcgacccacgaggtgtattccaggcgcaggcgctggcgactgctggtgcgcacatgcaggccggactcgctgagctgctgcatccactcggcggcggcgtagtcgcgcacgtggctggtgtcgcgcagcacttcgacggtttgcaggtaagtgtccaacagcgggctgcccggtgacaagacatccacgaaagccgccacaccacccggcttgagcacccgacgcacttcacgcaaggccaggccgaggtcgctccagtggtgggccgagtagcggctgaacacgaagtcgaactcgccatcggcgaacggcaggcgctcagcggcgccgttcacggtgcggatgttgtccaggccacggtccgtggcagcggcggcgaccacgtcgagcatctgttgggacaggtcgtaggcgaccacttccttgaccagtggcgcaacgtggaagctgacatgaccggcaccgcagcccaggtccagcagtcgcgcaccgccctgcccggccagttcggcctggagcagcgcgaattcggtgccctgggcgtgcacggcactgctcaggtaggcggaggcttgctcgccgaattgtttttgcacgacttgggtgtgggcggtggtggtcatggtggtttccttgggttttggggtgttggtactggcgctatcgcaggcaagccagctcccacagttggaatgcattccaatgtgggagtcgggcttgcccgcgatggggcccgcacggttaccgccaatcaggcatcgcgaaacaaccaaggctggctcgcccggtgcctggcttcaaacgcggcaatcgcatcgccgtcctgcaaggtcaggccgatatcgtccaggccattgatcaggcaatgcttgcggaaggcatccacctcaaagtggtacaccttgccatctgggcgggtcacggtctgcgcggccaggtcgacggtcagttggtagccctcttcggcctcaacctgcttgaacagctcgtccacttcggcatcgctcaagatgatcggcagcaagccgttcttgaagctgttgttgaagaagatgtcggcgtagctcggcgcgatgatgctgcgaaagccatactcttccagagcccatggcgcgtgttcacggctggaaccgcagccgaagttttcccgggccagcaagacgctggcgccctggtaacgctcggcattgagcacgaagtccttgttcagcgggcgcttggagttgtcctggtaggcgtagcccacgtccaggtagcgccactcgtcgaacaggttcgggccgaagccggtgcgcttgatcgatttcaagaactgcttggggatgatctggtcggtgtcgacgttggcgcgatccaaaggggcgacaaggccggtgtgttgggtaaaagcacgcatcgggtaatcctcagatcaattcgcgaacgtcgatgaaacgaccgttgacggcagccgcagcggccatggccgggctgaccaggtgggtacgcccaccggcgccctggcgcccttcgaagttacggttggaggtggacgcgcaatgctcacccgactccaggcggtccgggttcatcgccaggcacatcgagcagcccggctcacgccattcaaaaccggcttcgaggaagatcttgtccaggccttcggcttcagcctgcgctttgaccaggcccgagcccggcaccacgatggcttgcttgatggtcgaagccactttgcgacccttggcgatcaccgccgcggcgcgcaggtcttcgatccgcgagttggtgcaggaaccgatgaacacgcgatccaactggatgtcggtaatcgcctggttggctttcaagcccatgtacttcaaggcgcgttcgatggaaccacgcttgaccaggtcggcctcctgagccgggtccggcacgttctggtcgacggccaggaccatctccggcgaagtgccccagctgacttgcggcttgatctgggcagcgtcgagctcgaccacggtgtcgaacaccgcatcggcgtcggagaccaggtctttccaggcttcgacagcggcgtcccaatccttgccttgtggggcaaatggacggcccttgacgtattcaacggtcttttcgtccgccgccaccatgcccacgcgggcgccggcttcgatggacatgttgcagatggtcatgcggccttcgatggacaggtcgcgaatcgcgctgccggcgaactcgatggcatggccgttaccgccggcggtgccgatcttgccgatcacagcgagcacgatgtccttggcggtcacgccgaacggcaactggccttcgactttaaccaacatgttcttcatcttcttggcgaccaggcactgtgtggcgaacacatgttccacctcggaggtgccgatgccgtgggccagggcgccgaacgcaccgtgggtggaggtgtgggagtcgccgcagaccacggtcatgcccggcaaggtggcgccctgctccgggccgatcacgtgcacgatgccttgacgcacgtcattcatcttgaattcggtgatgccatattcgtcgcagtagtcgtcgagggtctgtacctgcaaacgcgacacctggtcggcaatggcttcgatgccgcccttgcgctcaggggtggtcggtacgttgtggtccggggtggcgatgatggagtcgacgcgccaaggcttgcgcccggccagccgcaggccttcgaacgcttggggcgaggtcacttcatggatgatgtgacggtcgatatagatcagcgacgaaccatcgtcgcgccgtttcacttcatgggaatcccaaagcttgtcgtaaagcgttttgccggccatcagtcggtcctcatcagcggtgtttctctatgccgggcttttcaataaccctttggcttgtgaggctgatggtatggcgctacattaaataactcaaattcatattttttatgctttggattaccaactggaatacaaccatggacctggccaacctcaatgcttttatcgccatcgccgagaccggtagcttctcgggcgccggtgaacgcctgcacctgacccagccagccatcagcaaacgcattgccggcctggagcaacagttgaaggtgcgtttgttcgaccgcctgggccgcgaagtcggcctgaccgaggccggacgggccttgctgccacgcgcctatcagatcctcaacgtgctggacgacacccgccgcgccctcaccaacctgaccggcgaagtcagcgggcgcctgaccctggccaccagccaccatatcggcctgcatcgtttaccgccggtgctgcgcgcattcacccgggaatacccgaatgtggcgctggatattcagttcctcgattcggaagtggcctacgaagaaatcctccacggccgcgccgaagtggcggtgatcaccctggcacccgatccccacaatctggtgcgcgccaccccggtgtgggacgacccgctggatttcgtggtggcgccggagcacagcctgatcagcaacggccacgtcagcctggccgatattgccgggcacccggcggtgttccccggcggcaacaccttcacccaccatattgtcagccggctgttcgaggcccagggcctcacgccaaatatcgcgatgagcactaactacctggaaacgatcaagatgatggtgtcgatcggcctggcctggagcgtcctgccgcgcaccatgctcgatgatcaggtggcaagtatcgctttgccgggcatacaactcagtcgccagctaggctatatcgtgcacaccgaaaggacgctgtcgaatgctgcgcgggctttcatgagcctattggatgcacaggtcgatctgccagggataccggcatgaaaccgtgcggcctccaggtctgaactgaaccgcgccttacgcccatcgagccaaggccctttgataatgcgcaaccccgtcgactccgtgccacccctgccccgcatttacgccctggaccctcaagaggcggaacaaagctgggacagtgccccgcaactgctggccgcgctcaatgctgcccggctgggcgcctggtgctgggaaatcgacaccggcaggataagctggtcgcggggcacccaggcgctgttcggctttgacccgcgccagccactgcccaaggacctggactacctcgacctgctcgcgccacaggatcgtgcccgcgtggtgcgggcctttcacgcggtattggccggcgagccgttcgaacaggcgatgcatcactatatccagtggccggacggcacccaccactggctggaaatcaatggcagcctggcacctgacaaagccgggcggcggcgcatgatcggggtgatccgcgagaccacccgccagcgcgaacgggagcacgccctcagccactcggaaaaacgcttcgccacgctgtttcacctgtgccccaacatggtcttgctgacgcgccagtccgacggattgatcagcgaggccaaccagtatttcgagatgctcttcggctggccggtcgccgatgccatcggccgcaccaccctggacctgggcctgtggcgccatccggaacagcgtgcgcaactggtcaaggcgacccagcgcaaaggcctgcccatcaccatggaggtgcagttctgcgccagcaacggccagatccacgacggcaccctcagcgcacaaaaggtggagttggacggcgaggcttacctgctcagcacgttcctggataccacagagcgcaaaatagccgagcaggccctcaaggacagccaggaacgcctcgacctggccctggactcggcgcaactgggcacctgggactggcacatccccaccggcatgctctacggctcagcccgcgccgcccaattgcatggcctgccgccggagccgttccatgagttcttcgacgccttctttgacggaatgcccaatgacgagcgcgagagcatgcgcaacgcttatcgcaccctgcgcgaaggcccggccggcaactatcagctgacgtatcgcgtgcccatggaagacggcagctcacgctacctcgaaagccgcgcccgcctgtaccgtgatgagcacggcgcgccgctgcgtatggccggcactctgctggatatcaccgaccaagtggaacgcgaacaacgcctgaccgcctccgaagagaaatttgccagcctgttccaggccagcccggacccgatctgcgttacctgcctggagggcggcgcgtttatcgaaatcaaccccgcgtttacccagacctttggctggacggctgccgaggtcatcgacaaaagtgccgagcagatcggcctatgggacgagtcgagcaagcgcctgcagcgtatcgagcggatgatccgcgagcaggcattgaacaatgtggcgatcgtggtgcatcacaaaagcggccaaagcctgacctgcgtgatttccagccgcctgatcaaggtgggcgaccagccgtgcatcgtcaccacgctacgcgatatcacccagcagcagcgctcggaagcggcgctcaaggccagcgaagagaaattcgccaaggccttccattccagccccgatgccatttccatcactgagcgcgacaccggtcgatatgtggaggtcaatgacggcttctgccgcctgaccggttatcgcgccgaggaagccatcggcctgacgctgtatcagatcggcatctgggccgatgaaaaccagcgcgccgcgctgctggccgagttgcagatcaagggccgcattcatcatctggaaatgctctggcacaacaagcgcggcgagttgctggcggtggaagtctcggtggagcccatcaccctgaatgaaaccccgtgcctgttgctgaccgcccgcgacgtgagcctgctgaaaaatgcccaggcgcagatccgccacctggcctatcacgacccgctgaccaacctgcccaaccgcgccctgctgatggaccgcctgagccagcagatcgccctgctcaagcggcataacttgcgtggcgcactgctgtttcttgacctcgaccacttcaagcacatcaacgactccctcggtcatccagtgggcgacaccgtgttgaagattgtcaccgcgcgcctggaagccagcgtgcgcatggaagacaccgtggcgcgcctggggggggatgagtttgtggtgctgctcagcggcctggaagggtcacgcatggaagtcagcggccaggtgcaggcgttggctgacaccttgcgtgaattgctctcggagccgatgttcctggacggtcatcgcctgcaggtcacgccaagcatcggcgtggcactgattcccgatcacggctccacgccggcggacttgctcaagcgtgccgatatcgccctgtatcgcgcaaaggattcggggcgcaacaccacgcagatgtttcacaacagcatgcaaaaaaccgccagcgaacgcctgcgcatggagacagacttgcgcctggccttgtcacgtggcgagttcagtgtgcattaccaaccccaggtggacgcgcgcggcaacaagatcgtcggcgccgaggccctggtgcgctggcaacacccgcaactgggcgcgcagtcgccttccgaattcatcaaggtgctggaagacagcggcctgatccttgaggtgggcacctggatcctggatgaagcctgcgcggcctttcaacagctgatccacgaaggcttggtagacccactgaatttcagcctgtgcgtgaacatcagcccccggcagtttcgccagaacgacttcgtggagcgggtggagcgcagcctcaagcaacaccagttgccgttcagcctgttgaaactggaaatcaccgaaggcatcgtgatccagaacctggatgacaccatcagcaaaatgcgccgcctgaaaaagctcggcgtgagctttgcgatggacgacttcggcactggctattcatcgctcacctacctcaagcggctgccagtggatgcgctgaagatcgaccagtcctttgtgcgcgacgcgacccatgaccccaacgacgctgaaatcatccgcgccattgtggccatggcccgcagtttgaatctggaggtgattgccgaaggcgtggagaccccggagcaactggcgttcctgcaaaaactgggctgccatttgttccagggttatttgcatagccgacccttgccgatcgaggggttccggcaactgctgaggtagccctcacaccagtttcaatgcccacattgctctatcggaccaccccgatgacgtcaagccgagcttttggccgtacatgtccaccgagccgtttaatgccagcaccgaatgcgtatcgtcagcgagagtaccaatggcgccgccggccaactcttgcgcactgctctgccgcacatgggcaatcaaccccagcctgcgcaacgcctggcctggcgcttctccgtcattcaacgagtgcatggcatcctcaaaactgcgaccggcacgcatgtcgttgttctccagttgcgcacgcttggcgctcacggcgtacaaaaagttggcatcgtccttgagcgccaggtcagaaccggccaggtttgacccctgctcggccttgcgccgctcttcatggctcagaaacagcttgaagccatcgcgcatgatcacgtcaaaaccacccggtacagcgctgatgtttttgtaaatacccgcaggattctgaccaaatttcatcattgcggccttgatcgccgatatcgtgacgcaattgccctcggcaccttgataaaagccgccccatatatccttcggtttcataccgactggcatctgtgaaacaaccgtgtcattgctgaagggcgaaaccgtttcgggccggggtttgtcgttgaacaggcggtagccgtagcctcggccaacacggcgcctttcggtgtagtcgtgcacgacgccaccgaggacaaacgcactgcctcggctatgcgtctccagcactcccgccaccccatccccgaccatctgatgagccgaaacatattgcgacagcccgtacaagcccatgccccgcaggcaccgcagggtcgtctcaccctgcaaggtatcagccaaggcgccgtcgaaactgtgatagccgcccgtaatctgcttgcgcttgacataggcggcaagcgcgacgttggcgctgtcaacggcgccactgtccgcaccggtgaagcgggaagcgcgccttgtctgttcgagttcatgttgggaaatcaccaccttgaactcgtctttcatggtgatggcgtacccccccgcaaccggcgtgaattgggtaaacatgtctttcgggcttgacccaaaggttgccatcatcatcttgatgaccgccgcatgggtgctggtatcaaaattctcgccaaaatgacgccgagaagcttcaaaaccgacgccctttgcggtcggtttggcaaccgcctgtcccgtagcgtgggtaacgtgcctgtagtccggtgaactccaccagccgacaggaggagcaaagacagcaaaggtcataaaccctccgaaaccaaattgaatgagtgaaaaaacgctgcccccaaccagccctccccaatcgcacctgtgatcggggaggctggatccctcatcaagcttttaagacgagccggctgacatcaagactcgtctgcacctcaggcccttaccccttccaatcgaggattcatgaccctgcggaggacggtgggggttttcacttctacagttggctctgcatcaaccttgtccgaaggttgtggccctggagtggccggcgtctggaccttcggctctgcaccgactgctacctcagccttttgctccccgttcgactcgccattcaccttgggttcagtatccgctatcgcctctgccttcgactgagaaatggtctttacttccgcgtccggctgcgtatccagcgccacgcgcgtcgactgcctcgggataatgtcacggatttttactggttggttctccccccacccctctgaactaatccgcacgttgacaccggcctccacgcgtaccctgaactgtttaccttcctcagctgtaacgctcacttgcgtactgccatctggcataacctgcacctgggcatcaccacccgacgtacccacctgtgcgtcaccgccaactttcccctgaacgctatttccgacagtctccgccgacgaacgattgctaaaacccgtgattttcatctgcgcgccgccactcgcgtcggccttgacattaccgtccttgccggttgtcactgtggtcgatttattattatcgtcagcagtcttcacttgcatggaggtatctgcaccgacgcttacattgccgtccttgcccacagtaactgttgccgttttattgtcgccggtggctttaacttgcacagagccgtcagcaccaatactgactttagcgtccttatccgcagtaactgtcgagatattattatcgctagcagtcttcacttgcgtggagccatctgcattgatactcacactcgcaataccaccggagaaccgttcactgttcttggcaaaaggtaacggcttccctttggaattcaccccgccctccacagacacttcaataccactctccgtcattgcggtatgcggaactactgttgcggcttgagaactgaatgccctgccggacaagaggctgcgcatggccttgaagaccagatcaaacatctcaaataatttttccagcgcatcagagttaacggaaatctcctttgctcccgtcaaaggttgattaacgtctcgggcagcccctttaataccgagatccgtagcgagcgtgctcacgcgctcaacatctttcagaagaccagtagaacgttggcttgccgattggagttccggaacaaaagccttaggagtgccaagcgatacattggacatcttgtaacctcatgattagttatgtgctgcctcgaagcatttagaaactcggacagcaattaatataaaactggaaacaatcatcatctcgcagtccctattttcgtggaccaaaacacgatcaagttccaataatccaacttcacataaggcaaacaaaattgaaaatcagattttagcctatggctgtttgaggaaacgctctacacccactgcgccagcgaacgccgcatggacaaacaaggtaacaaccaagcccaaatcaaaaacaatgaaaccattaacccccaacaaaacccaacacttatgctaattgcgcacaagcacgtatcagaaaacaattaacttgcgcttcccccggaaaactaaagcagcaatcaaataactgcctacattcacgctcccacaatcaacatcagtaaacatgaatgcccttgcccttcaggcccgggaacattcacttaaacagcgcacaaaaaagggcgccaagggcgcccactcatcgatgcttttgcaaacttattaaatatgaacgctatttttcagcgccgtcactcactgcgagtctaccggcaccataccgagcaaacgactcacttgggccaactcggtttcccggcgcatggccgtaaacagctccaccgcttccggatagttgcgcgtcagcatcgccagccattgtttcaaacgacctggtgcctgacgctcggtcagttgcgccaccgactgagtccagaagtcctggagcatgggctgcatctgcgcccaggtcatttcaaccacctcctcacccgcccgcgccgcagcgatctgccgcgccaggtccgggcgcgccaccaggccacggcccagcatgatgtcttcggcaccgctgatttcgcggcaacgcttccagtcttcgacgctccagatatcgccattggcgaacaccggcaccttgaccacatcctgcacccgcgggatccattcccagtgcgcgggcggcttgtagccatccgtcttggtacgcgcatgcaccacgatatgcgcggcaccaccctcggccaacgcggtggcacagaccagggcgccgtccgggctgtcgaaacccaggcgcatcttggccgtcaccgggatgtgcgccggcacagcacggcgtacgtgctcgacgatctggttgagcaactccggctccttgagcagcaccgcaccgccacgggacttgttgacggtcttggccgggcagccgaagttgaggtcgatgacctgcgaaccgagctcacaggccagggcagcgttttccgccaggcacaccgggtcggagccgagcaactgcacgcgcagcggcacaccggcagcggtgtgggcaccgtgcagcagttccggggccagtttgtggaaatacgcgggggtgagcaggcggtcgttgacgcggatgaactcggtcacacaccagtcgataccgccgacacgggtcagcacgtcccgcaggatgttgtcgaccaacccctccatgggcgccaaagcaatttgcatggaaaacactcaacaaaaatcgtggcgcagtttactgggtttcccacagcaaccgttaaccccctgtcagggcggggccataaccgtcaaggaattcagccggcatgcgcttgggcttgccagtggacagctcaatgcagacgaaggtggtttgtgcgcgcaacagggtcgcgccgtcacgggggcggaccagttggaagcgccgggtcattttcaggcgctggtcccagtcgacgatccaggtggccagttgcagctcatcgccttcatagccagcggccaggtaatcgatctcatggcgcaccaccgccatggcgcgatccagccggcgatattcgctcaggtccaggcccaggcgctgggagtggcgccaggcgcagcgctccagccaggacacgtataccgcgttattggcgtgccccaggccgtcgatatcttcaggagcaacctgcagatcgatgataaacggcgttgccaaatcccagcccatgccttgctcccagtcgattaatgtcggcggggagagtgtatcaggcgctttgccgctcctgtagacgacggccggccaacaacgccagcacagcgtcgatcacgcgcggatcggccaggactttctggtgaccaccctgctccaggcgcaacaggcgactgtcgaaccaggcttcgtgtatggcctgagaggctttgaccgggacgaaggtgtcgtcttcggcatggacgatcaggcccgggatattcatctgatagtgggccacgtccaaatgcttgagcggcatgccgaaggtcagctcgacctcctggataaacgccgaacgtgcccgcgccggcaagccgaccatcttggtaaagccgcgcaatacatccagaaaccgtgagggtgcagcaatgctcaccaacgcctccgtgcgcagccccaactgcaccgccaacatcgcactggcaccgcccatggagtggccgatgacggcgtgcagcggcggcaactcggcggcagcttcaagcatggcacgggcaaacagcagcacatgggcttcacgccccggcgaacggccgtgggccggaccgtcgagggcaatcaccgagtagccgttgtcgaccaatgcgctgatcaggctggcaaactgggtaggtcggccttcccagccgtgcatcaacaacacggcaggcccctgaccccagcgcaacgcggacaagccgaaacgcagggtgatgcgctccgattgcgccagcagcggcagttcccagtcacgtggcggcaggtcgcggggcgtcatgaaggcgcgacgcatgcgattggcgaccgtttgtggtgccaggtgccccagcgtgccgttgaaacgacgaatccaggtaagcgtgcccatcatgcagccctcttctagcgcacagccgacttggcggcgcgcagcacacggtcagacaactcgcccggtcccaaggcgcgggccagggccaggccaccgatcatcagcgccatgtcagccagggctttgtcggtgtcctcggggctggcagccaactgggcggccatcagttcacagtgctcattcagtgcctggcggaactcatccggcaggcggctcatttcgccgaccgtggcgggaatcgggcaggcctgggcggtggagtcgcggtgcttgcgcgacaggtagaacgccgccaccaggcttctgcgctcctctccggtcagttgtgagtccatgtcatcaatcgacgcacgacgcttggccagcaactgagtgaaggcctccagcatcaatgcatccttgctttcgaagtgcgcatagaaaccaccgaccgtcagccccgccgcacccatcacttcacccacactcggttcggccgggccacgctggatcagcgcggcgctggcggcctgcaaaatgcgttcgcgggtttgcgcttttttatcgctcatcattgcctccgatgttcatgggttgaatattattaccataataatatttggcaagcgacaggcatgaccgttggtcagaagaaaaagcaaggagggcaaaagaattggccaaacgccagacaaacaaaagggccattcaataattgaatgacccttaaaaatcccgcagagcgggtaatcgtggcgtcccctaggggactcgaacccctgttaccgccgtgaaagggcggtgtcctaggccactagacgaaggggacacaaaccttctgtacactgatcaggctgaggctgatcgatccaaggacggtgtggccggaaccttggaactgtaaattggtggagctaaacgggatcgaaccgttgacctcttgcatgccatgcaagcgctctcccagctgagctatagccccggatttttcgtctcgcgacgtagcaggcctttcgaactgcttggtgaaactggcgtcccctaggggactcgaacccctgttaccgccgtgaaagggcggtgtcctaggccactagacgaaggggacaaaaccttctgtacagctgatcagcgctgagagctgatcgattcaaggacggtgtggccagaccttgaacctgtaaattggtggagctaaacgggatcgaaccgttgacctcttgcatgccatgcaagcgctctcccagctgagctatagcccctcatcggtgaggacggggcgaatcttaatggcggtttggaagtgtgtcaaatttattttcaacaatttccaaaattttttgccgggataacaatcacttaccggcgaaaccccggaaaaccggggtttcgtcgtttcaaccgtgtgctcaggcgatggcgcccagcagcttttcccactctttgttttctttcttcgacacaccaccaagcaaatcaagggcttggcgcagacggaaacgcgtcaggtccgggcccaggatttccatcgcatcaagcaccgacaccgaactcgcctgcccggtgatcgcggcaaacatcagcggcatggcatcacgcaatttcaattccagggattccaccaccgcctggatcgtcgcagtgatcgcatccttctcccactggcgcaggctttcgagcttccacaggatcaactgcatcagttggcgaacctggtcgcccgagagtttcttggattcaaacagcttggcatccgggctcacgcccccagcaaagaagaagctggccaacggcgcgacctggctgaacgtctccaccctgccctgcaccagcggcgcgatcttcatcatgtactcagggttcaacgcccactgctgcacacggctggcgaactcttccaccggcagatcacgcagccactggccgttgagccacgacagcttctcgatgtcgaagatcggcccgcccagcgacacacgcgacaggtcaaagttgtcgaccatttcttgcagcgaaaacttctcgcgctcatccggcatcgaccagcccatgcggcccaggtagttgagcatcgcctcaggcatgaaacccatgcgttcgtagaaggtcaccgaagtcggattcttgcgcttggacagcttgctcttgtccgggttacgcagcagcggcatgtagcacagctgcggttgttcccagccgaagtactcgtagagcaggatcagcttcggcgccgacggcagccattcttcgccgcgcaatacgtgggtgatgcccatcagatggtcatcgaccacgttggccaggaagtacgtcggcaagccgtcggtcttcatcagcacctgcatgtccatgcggtcccacgggatctcgacgtcaccgcgcagcatgtccggcaccacgcacacgccttcgctcggcactttcatgcggataacgtgaggctcaccggcagccaggcgccgggccacctcttctttcgacagcagcagcgcgcggccatcgtagcgtggggtttcgccgcgagcctgttgctcggcacgcatctggtccagttcttcggcggtgcagaagcacgggaacgcatggcccatgtcgaccagctgctgggtgtactgcttgtagatgtcgctgcgctcgctctggcgatacgggccgtgcgggccgccgacgtccggaccttccgcccacgtaatgcccagccagcgcaaggcatcgaaaatctgctgttccgactcgcgggtggaacgcaattggtcggtgtcttcgatccgcaggatgaattcaccgccgtgctgcttggcaaagcagtagttgaacaaggcgatgtaagcagtgccgacgtggggatccccagtaggcgatggcgcgatgcgcgtgcggacggtggtcatggcaggtctcgaatgggcgataaaactgaaaattgaaacaaggggcgaatggtaacagcctgggggatttctggaaaaccgcggcgcggctatcgggggcaagccccctcccacatttgaccgaggtccagtgtgggagggggcttgcccccgatgaaaccaccgcaaatcagacggccagcaagcgctcccgcaacttgccgatctcatcccgcgtctgcgccgccgcctcgaactccaggtcccgcgccagctggtacatcttctcttccagttgccggatgcgcttggtgatctcgctcggcgagcgcaattcgttctcgtacttggcgctttcctcggcagccttggccatgcccttgcgcttcttgctgcgcgagcccggcacggtggcgccttccatgatgtcggcgacgtccttgaacacgcccttgggcgtgatgccattttccaggttgaacgcgatctgcttgtcgcgacggcgctgggtctcgccaatcgcccgctccatggaaccggtgatgcggtcggcgtacaggatcgcccggccattgaggttacgcgcggcacggccgatggtctggatcagcgagcgctcggagcgcaaaaagccttctttatcggcatcgaggatcgccaccagcgacacctccggcatgtccaaaccttcacgcagcaggttgatccccaccagcacatcgaaggtgcccaggcgcaggtcgcggatgatctccacgcgctccacggtgtcgatgtccgagtgcaggtagcgcacccgcacgccgtggtcggccaggtagtcggtcaagtcttcggacatgcgcttggtcagcgtggtgaccagcacccgctcttccagggccacgcgcttgttgatttccgagagcaagtcgtcgacctgggtcaacgccgggcggatttcgatttccgggtcgaccaggccggtcgggcgcaccagttgctcgatcacacggcccgcatgctcggcctcgtagttacccggcgtggcggacacaaaaatagtctgcgggctgatggcttcccactcatcaaagcgcatcggccggttatccagcgccgacggcaggcggaaaccgtactccaccaacgtctccttacgcgaccggtcccccttatacatcgcgccgacctgcggcacgctgacgtgggattcgtcgatcaccagcagcgcatccggcggcaggtaatcgtagagggtcggcggcggcgccccggattcgcggcccgacaggtagcgcgagtagttttcgataccgttgcagtagcccagctccaggatcatctccaggtcaaagcgggtgcgctgttccaaacgctgggcttcgaccagtttgttgttggaacgcaggtactccaggcgctcggccagctcgaccttgatgccctcgatggcgcccatcagggtttcacgcggggtcacgtagtggcttttcggatagaaggtgaagcgcggcagcttgcggatcacctcgccggtcaacgggtcgaaggccgacaggctctcgacttcatcatcgaacagctcgatgcggatcgcttccaggtcggattcggccgggtagatgtcgatcacgtcgccccgcacccggaaggtcgcgcgggcaaagtccatgtcgttgcgggtgtattgcaggctggccaggcggcgcagcagttcgcgctggtcgagtttgtcgccgcgatcgacgtgcagcaccatcttcaaataggtttccgggctgcccaggccgtagatgcacgacaccgtggtgacgatgatcgcgtccttgcgctccagcagcgccttggtcgccgacagccgcatctgctcgatgtggtcgttgatcgacgcatccttctcgataaaggtgtcggaggacggcacataagcttcaggctggtagtagtcgtagtaggaaacgaagtactccaccgcgttgttcggaaagaacgccttgaactcgccatagagctgcgcggccagggtcttgttcggcgccagcaccagggtaggacgattgatttgcgcgatcacgttggcgatgctgaaggtcttgcccgaaccggtcaccccgagcagcgtctggtgcgccaggccggcttcgatgccttcgaccatctggcgaatggcttcgggctgatcgccagcgggttcaaaacgggtgacgagttggaaatccgacataacgtacctcgtgtagtcaccccagactcgaaaccgccagggacgaaatagctcagcaacccgcgaatgatcatcgcaggttgcaggaaaaaaccatgatagctgtagaagtggtgccgaatgtgacgggtttcaagaccatcgtcctacgtgccgtgccggatcaatgttgcaataagactaacggtcagcaaataaaccgaaaaacttggccgaaaagccatttcggctgtcgccctcggcagtgatgggctctatactagctccccgtttgtgcaccgctctagtgcattcggctggagcgcgacacgtccctcctaccccccatagagctgccgcaaaaatgagcctgttctccgctgtcgaaatggcaccacgcgatcctatcctgggcctcaacgaagcattcaacgccgatacacgaaccaccaaggtcaaccttggcgtgggcgtttactgcaacgaggaggggaagattccactcttgcgtgccgttgccgaagcggaagccattcgcgtggcacaacacgccgcccgtggctacctgccgatcgatggcatcgcagcctacgacaaggctgtgcaaaccctgctgttcggcgctgaatcgccactgctgaacgctggccgcgtcaccaccgtacaagcggtcggcggcaccggcgcactgaaaatcggcgctgacttcctcaagcaactgctgcccaacgctgtcgtcgccatcagcgacccgagctgggaaaaccaccgcgccctgttcgaaaccgccggtttcccggtgcagaactaccgctactatgacgccgccacccacgacgtgaaccgtgccggcctgctcgaagacctcaacgccctgccgccacagtccatcgtggtgctgcacgcctgctgccacaacccgaccggcgtcgacctgagcccggccgactggcagaacgtgctggacgtggtcaaggccaagaacctggtgccgttcctcgacatggcctaccagggctttggcgacggcatccacgaagacgcagcagcggtgcgcctgttcgctgaatcgggcctgaccttctttgtgtccagctcgttctccaagtcgttctccctgtatggcgaacgggtgggcgcactgtccatcgtcggcgagtccaaggaagaaagcgcgcgcatcctgtcccaggtcaagcgtgtgatccgcaccaactactccaacccgcccacccacggcgcggcgattgttgccgcagtgctgaacagccctgagctgcgcgcccagtgggaagccgaactggccgaaatgcgcctgcgcatccgtggcatgcgcgagcagatggtcgcaaccctggccaaggctgctccgggccacgacttcagcttcgtcggccgccagcgcgggatgttctcctactctggcctgaccgttgagcaagtcacccgcttgcgcagcgaattcggcatctacgcactggataccgggcgtatctgtgtggcggcgttgaaccagtcgaacattgatgcagtcacaaaggcaatcgttcaggtgctgtaaacctgcagccgttgcaccagaaggggaagccgatggcttcccctttttcgtctccagcccctagactgaacctcgaccgcccctttgctgtgagtaccttatgagaaacgatgacctggacctgcgtgccgaccgcgacgaactggaccacttcaccccgcgcgcaccgcaagtaaagcgccagaagagcctggtgctgcaagtggcgctcggtgtgttcctcggtggcctggcgctgtggctggtgcaattgggcgcgactgcaatcatggcaaaactggccatgggcaccctgcaattcggcggctgataccaatcacaatctaggaagcaaccagatcgcgttcctccaacagctttacaaagctgttgaggctctgcgacaccgtcccgcggcgccagatcagccaggtattcaaaatccggaagttatccgtcagcggccacacactcaccgctgccgaccccggcatgctctccagcatgctacgcggcatcagcgccagcccggcgccggcgctgacgcaggcgagcatgccgtggtaggactcgatctcgaaaatcttgcccggcaccgcgccgtcctgtgagaaccagcgctcaaaatggtgccgatacgagcagttggagcggaaggtgtagatgttctcgccattcacatcctgaccacgcttgatcggcgcatgatgcagcggcgcaatcaccaccatctcttcttcaaacaccaccaccccctccagcgtggcatgcagcaccggcccatcgacaaacgccgccgccagccgtcccgataacaccccttcgatcatcgtgcccgacggtccggtgctcaggtccagctcgaccttggtgtgcttctggttgtacgccgcgagcaacgccgggatacgcaccgccgccgtgctttccagcgaaccgagggcaaacgcgccctggggttcctcccccgccacggtcgcgcgggcttcctgcaccaggtcgaggatgcgccgcgcatagccgaggaaattccagcccgccggcgacaggcgcaagcggcttttctcgcggataaacaattccacgcccaggtcctgctccagctgcttgatacgcgtggtcaggttcgacggcacgcggtgaatcaactgcgcggcggcgctgatgctgccttgctcggcaacggccttgaagatttccagctgcaccaggtccaagtcattctccaatcgtgaatgtattgcttaatattattcagtttccagaaaagagctagccccgtaggctgaacccaatctcatcattcagcaggacggtgccatgaacgcgactacccacgccctctcgatcaacccggccaccggcgaaacggtcggcagctacccgtatgaaaccgcgcagcaactggacgccgccctcgagcgcgccaccctcgccttccgcacctggcgccgccagccggtcagccagcgcgccgagttgctgctgagcctggccagcgctctgcgcgaacaagccgaagacatggcgcagatgatcaccctggaaatgggcaaacccatcgcccaggcccgtgccgaaatcgaaaagtgcgcgcagctcagcgagtggtacgccgcccacggcccggccatgctcgccccggaaccgaccctggtggacaacggcagcgcccagatcgaataccgcccgctgggcccgatcttcgccgtgatgccgtggaacttcccggtgtggcaagtcctgcgtggcgccgtaccgaccatgctggccggcaacacctacgtgctcaaacacgcgccgaatgtgatgggcagcgcttacctgatccaacaggcgttccgcaaagccggtttcgacgaaggcctgtttgaagtggccaacgtgaccaacgacggtgtgtccaaggccatcgccgacccacgcatcgccgccgtcaccctcaccggcagcgtgcgcgccggtatcgccatcggctcccaggccggcgccgcgttgaaaaaatgcgtgctggaactgggcggttccgacccgttcatcgtgctcaacgacgccgacctcgacgccgctgtgcaagccgccctgatcggccgcttccagaacagcggccaggtctgcgccgctgccaagcgcctgatcatcgaggacggcgtggtggaagccttcaccgccaaattcctcgaagccagccgcgccatggtcatgggcgacccgacttcagccgccacctacatcggcccgatggcccgcttcgacctgcgcgacgagttgcacggccaggtccaggccaccctggaagaaggtgcgaccctgctgctgggcggccataaagtacccggcgccggcaattactatgcgccgaccgtactggccaacgtcaccgaccagatgacctcgttcaaacaggaactgttcggccccgtagcctcgatcatcaccgcccgcgacgccgaccatgcggtggccctggcgaatgacagcgagttcggccttaccgcgagcatcttcaccagcgacccggcgaaggcgcgggacatcgccaatcagctggaaaccggcggcatcttcgtcaacgccttcagtgtttcagaccctcgggtggcgtttggtgggatcaagaagagtggcttcgggcgtgagctgtcgcacttcggcgtacgggagttctgcaatgcccagaccgtgtggctggatcgcaaataaatcagagcagcaccagccccgggccaagcccgctcaccacaggaatctggtcgcctgaaagtgtttatgcacgaatatgccgccgcacacactgcaccaacccctccagcgcctgcgacttcactggcgcgagcacacagaccgtgtgttcgcgctggtcctccttcaccgtcagggtgtaatgcacctggcccgggttaccgggcgcgggttcactgctttgcggcagctgaaagaagtcgcacgcctcgaccaactgccgcaactcctgctggtcctgctcgggcaggctgtccaactcaactgtacgcggcttggccaggcccggaaaaaaagcaggcccgccgttttccttcagcgaaatttgcatggctgttcctcacgtcagaccgaaataccgaccgccttccagccctccttgaccgccttctgctcatccttgttcgcaccgtagagtcgaccggcaacatcgtaggtaatgcgcgcaaagcgcaaaaaccctgagttcggtcgcaaccgcgcatcgcgcaatgcgtcgtaccagatgcgcccggcacgctcccaggcaaacccgccgatgtttgtcgccacctggtagaacgcatggttgggaatgccggaattgatatgcaccccgccattgtcctcgtaggtctgcacaaaatcatccatgtgcccgggctgagggtccttgcccagcagcttgtcgttaaacgcggtgccaggggctttcatcgagcgcagcgcggtgcctttgatctttttggtaaacagccctttgccgatcagccaatcggcgtcctcggccttttgcttcaacgcatactgcttgatcaacgaaccgaacacgtccgacagcgactcgttcaacgccccggactggttgaaatacatcagcttggcctcatcctcggtgacaccgtgggccagttcatggccaatcacgtcgagggctaccgtaaagcggttgaacagctcgccgtccccatcaccgaacaccatctgggtcgagttccagaacgcattgttgtagttctggccaaagtgcacggtagcgtccagggccatgccggcatcgtcgatggagttgcgatcgaacacctggtcgaaaaaatcgaaagtggcgcccaagccatcataggcctcgtccaccgccgcgtcgccactgatgggctggccttcgccacggatcagtttgcccggcaggctgtcggtgccctcggcgctgtagatcgaacgccgtttgtcggcgcccatcgccagcgccaggtgcgccggccccttggcaggcaccgcgaccatgcgcagtgagcggaacgtgctgtccttggcgcgagtacgcagcgcgacatcccgttgcgctttgtcaccgttacgcgcgatctggtcgagcatatacggcggaatcaggcagaaaatcgggtttcggtaatggcgatcacacattggctggctccttgttggcgtgtgctgaacgtccgggtgaccgtttgaggatagcccccaggggttggtgcgcatgatcaattgtcattaacctatgttgcagtcgtgtttatccaaggaggactgaccgatgcccgcacgtaaaaccaaaatcgacctcgcctaccgcccccggctcgccgacatgcgcccgttgatcgcgccgagccccacgctgctggaggccagggcagcgacaccccgcgtcaccccggccaaagacttgaaggaccgaagtggctacgcagaagactttctcggcagcttcggggtgccctggcccacgctggaggaggcgttgacgagtgatgcccagaagcgcctggactacacacacttctccatcacgatgtcacgtgccaagcgcctcgcgctgtatgtgggcgtgaacatcgatggcgggcaacatgtggacatcatccgcagcaacgacacctgggcttacgatggccgcctgccggtcgacgcccaagtcggcgaagcgctgtatgccagcaacggcctcgatcgcggccacctggtgcgccgccaggaccccaattggggtgatgtggcgcaaaccgccaacctcgacaccttccacttcaccaactgctcaccgcagatgagcgggttcaaccagaagacctggctggaactcgaagactacatcctcgacaacacccagcgctggaaagcccgggccacggtgttcagcggcccggtgttcgccgacgacgaccgcgtgtaccggggcgtgcagatccccaaggcgttctggaaggtggtcgcctacctcagcgatgacggcaaaccttcggccagcgcctacatgatcgatcagagccgcgaactgggccagttggagctggtgttcggccagctgcgcacctaccagcgcagtgtgatccagatcgagcgcctgaccggcatccgcttcggcaacctggccgactacgacggcttcagcaacgaagaacgcgccaccggcacgcggattgaagcgctgatccaggggcctgaagacattcgtctttgatcaacgcttcacaggttgatccgcgttgacaactgacactcaccacgacgcgaggcgagccgctcttgatctggctgatacgattccatcaagggtgaacactgcatccgtggcgagcgccgtacccaggcgagtgaacgggctagccatcattgcgcgttgatgtaatgaaactgtgcctgcgttttctcgactgccgcacgcacggcgtctttctgcgcctcggtgcccgagtagtaaatctgcatacccttcaagttttgcccttcgactgctttgccgatcaccgcaacatcaaccggcgtgctggcaccgataatcaaaaagaacacatcgcccaagcgtttggcatcgagcagctctgccctgaggtgcgcggcattttgctcacccgccatggaaatcgccagggtatcgccgaacataccgcttttggggatgctcatcgtatgcagccggagcttgtccgaccccgccggcatcgacttgacataggcggaggcggcctcatcaagaatctgctgttcagatttaccctgggtggcacaaccgacgagagcggcggcgagggcgagcgcgacgaataatttcactgtctattccttgtgataaagcgatccattggctgcgcatcataggagccccaccttcaaagagccaccgttggtttcacggcctcccgctcgaccgcgtgatcgactaccataccgcgccggttcccaaacgggactaatagggaatccgaggcacggtacacccgcgccaatcggaactgcccccgcaactgtaggtgctgagcctgctcctcgatgccactggacctcgtccgggaaggctggagcgtggcgacgacgcatcagtcaggagacctgccggcccaagctcaatcactaaccggcggggtgtccgggaaggacattcttgcctgtcgcgcccccggcgcccgagagtggatttccgaatggcacgtacgcatcactcggagatcgccccatgctgccacgcgttatcgccctgcttacaggtgttggcttctgtgccctggcccacgccgcgcccactcactacccgctgaccgtggaaaactgcggcagcccgatcaccttcccgcaagcccccgcccgcagcgtgactatcggccaggccgccaccgagatgctctacgccctgggcgtcggcgataaagtggtcggcacctcgctgtggttcaacagcgtgttgccgcagtacaaggcgcagaacgacaccatcgagcgcctggccaacaacgagccgagcttcgaagccgtgatcgccaagcgcccgcaactggtggccgccgagctggaatgggtggtggggccgcaaggcgtggtcggcacccgcgagcagttccatgaactgaagattcccacctacctgctaccctccgactgcgaaggcaaggacaacctggtgggcgccgacggcacgcggctggagccgtttcgcatcgagaccatttataaaagcatcagccaactggcgcagatcttcgacgtacaggatcgcggccagcagttgaacgatgaactcaaggcgcgcctggccaagtccgtcgccaccgtgcagggcaaaggcctcaagcaggccagtgcgctggtgtggttttccagtgccgagatggccagcgacccgtacgtggccggccacaaaggcatccccgaattcatgctgcaaaccctcggcctgtctaacgtggtgcagtccgatgaagagtggcctgccgtcggttgggaaaccatcgccaaggccaacccgaccttcctcgtcatcgcccgcatggaccgccgccgctacccggccgacgaccatgaaaagaaactggccttcctgcgcagcgacccggtcacgcgcaacatggacgcggtgaaaaacaaccgcatcatcatcctcgacgccttggcgttgcaggctagcatccgcatgttcgacggccttgaacaactggccacggccatcgacggctacgacctgccaaaatgatgcgcaccctgctcgccctggccctgctcctgattgccgtgctcgccggcgtggccatcggcgaaaccgccatctcgccgcaggtggtgctccaggtactcgccaacaaactgtggggcgccggctacgtgctcgaccccatcgatgaaggcgtggtgtggaactaccgcctcacccgcgccctggtcgctgcggcctgcggtgccgggctggcgacctgcggggtgatcctgcaatcgctgttgcgcaacccgctggccgatccctacctgctgggcatcagcgccggcgcttcgaccggtgcggtgctggtggcgttgatgggggtgggcggcggcttggtgtcgttgtcggcgggcgcatttgtcggcgcgatggcggcgtttgccctggtaatcctgttggcacgggccagcggttcggccagtggcaccgggcagatcatcctcgccggcattgccggctcgcagctgttcaatgcgctcaccgcgttcctgatcaccaagtcggccagttccgaacaggcccgcggcattatgttctggctgctcggcaacctcagcggcgtgcgctggccctcggtgtggctggcggtgccggtggccgtcgtcggcttggctgtgtgcctgtggcaccggcgcgcgctggatgcgtttacctttggcagcgactcggcggcgtccctcggcatcccggtgcgtcgcgtgcagtttgtgctggtgggctgcgcggcgctggtgacggcggtgatggtgtcgattgtcggctctatcggctttgtcgggctggtgattccccacgccgtgcgcctgttgcttggcaccgggcactcacgcctgctgccggcgagtgccttgggtggtgcgttgttcctgattgcggcggatgtgctatcgcgcacgctgatcaagggccaggtgattccggtcggtgtggtcaccgcgctggtcggtgcgccggtgtttgcgctgatcctgatcggccggaggaatgcgcgatgagcgtattgagctgccgcgggctgggcttcaaggtgcgcgaggccgagttgctgcgggatgttcatctggacgtgcagttgggtgaaaccctcgggattgtcggaccgaacggctcaggtaaatccaccttgctcaagctgctcgccggcttgcgtgcacccgcatccggcgaagtgctgctgggcggccagcgcctgggcacgctgtcccgccgcgccatcgcccagcaactggcggtggtggagcaacaggctgacaccgacgacgccatccgcgtgttcgacgccgtggccctgggccgtacgccatggttgtcggcgctgagcccgtggtccgttgaggacgacgccatcgtgaagcaagccctgcaggacgtcgacgccacccacctgagccaccgcgcctggcgcagcctctcgggcggtgaacgccagcgcgtgcacatcgcccgcgcattggcgcaacggccgcagattctgttgctggatgagccgaccaatcacctggatatccagcatcagctggcgatcttgaagggtgtgcaggcgctgcccgtgaccaccttgattgcgttgcatgaccttaaccaggcgctgacctgtgaccgcctggcagtgttggatcgcgggcggttggtggccctgggcaaaccgctggaagtactgacgccacaacggttgcaggagacgttcggggtgcaggcgcattacctgacggacccgcttgatggggcgaagatcctgcggctgcgccccgcttaatactggaatagcggtttatcgtggcgagcgggcttgccccgcgttgggctgcgaagcagcccnnnnnnnnnnnnnnnnnnnnnnnnnnnnnnnnnnnnnnnnnnnnnnnnngggctgcttcgcagcccaacgcggggcaagcccgctcgccacaacaagcccacttgccacaaaagcccgctcgccacaggcctacaggaactgctgcatatgcgccgtccgccagaccgggtctgcttccacatctacgacctcgaagccctgccgaacccagaactcaatcgcccccggcaaaaacgggtgggtatgcaagtacatcacctcaaccccatccgcctgcgccatcgcttccaacgcacggtacaactgccccgccaagccaaaacgacgaaactccggcgctacgaacaagcgcaccacctccaccgtcttgcggccttggtaatccagttgagggaaacgcccgtcatagggcagatacccgatggccgcaacaatttcgccaccgttgcgagcgatcaaaaagcggccttcgccctgaagataaatcgacgcaaagcgcgcgaggtcatccggcatgccggcgtcgtgaagcttggggaacagctccgcacgcgcctgcagcacaaagtccagcacctgtggcacatcccccattgcaactggccggatgatcactggcgcaactcacacaccgcattgcccttcatgcccgacgcatgcacgctcacatggcgcaccgtaaaaccgggcttcaccaccagcttcttctcttcccaggtgccgccgttttcaacctggtaaccgatggcgccatcggcttgccaggtcaggcgcagggtgtacacgccgttatgatcgagtgtttgatgaatcggcgtatcgatgatcggcttggccttattgaacgtacgcaggttgaaaatccgctgatccgtaccggctggcgaatagctggagagaaacaacgtatcgtcttcggccgcatcctcggcggccgccaggatcaccgacggcacccacttctcgccacggtcctgggtgtcggtgacgaccttgcaggtcaactggcccttgccggtgacgttctggcgccagcccgtttcgtaaaaaccgtagggcacatcgaagcgcagggtcttctcggtgacttgctcgcagccggccaacaggtagagcgctgataaagcgatgactccttttagaaacttcacgtgctgtccttggcttgaataggtggggccgagagattacccgcgcagtcagataaagtggatagatttagcgggctgccgtgtcgtgatatacctgcgcccgtcattgatttcaaacccgacgggttaaaggagatgagcagaaaatgactgaactacccatggctgacgcgcgccagaatgataaaagccgcaaggtcatccagaccgctatcaaagaacgaaacctggcaggcgcggcaaacaacaccaagtggaacgaactgattacacacatgcgccagcgctcggggtgggtaccgtcttatcgctcaaaatacatcacaggccatatctcgggatgggatgtggaatggttttaccacctacctttcccttttgcgtatgtcgaatggctcgacatcggcttgtggcaagaagcgccttcgttaggcgtattactgccacgaacgtatattgaccataccgaggaaatctctcaggttatctcgcagataggcttcgaatttgaagtgaaagccgacgtactgagaatttggggataccttccaaaatccttcgatgactttccgccggcataacgtacagcggcggatcctgcggctacgcccgaactaacgccttgccactgctggccctgctcagccaccgtcactgtagtgagcgggcttgccccgcgctgggtggcgaagccgccccaaacccaggcgcctcggtgtgcctggggtcccgttgcgaacctggcgcggggcaagcccgctcactacaagttacagtcggcatggcggtttgaatgatcatctccctagtagggcactgatccactggtggctataagcaagcacgcgcccccccatcaccaccggaaaatgaataaacccatgcgccgcctccggcaacagatgcgcctcagcccccggccaccgctcagcgatcaacagcgtgtcatccttcaacgggtccaacgcccccacaaacatcaacgccggtggcaagccttcgaagtcgccatacaacggcgataacggcggctgccgacgctcatcatcgctcaggcccggcgtcagcatgcgcaacgcctcgaccatgcctggcccgtccagcaacaaggtgtccggccccgccgcacgtacgctcggggtgccggtcaagtcgtacacgccgtaatacaacaccgccccgcacacgcgctggagcagttgcggccattgcttcaacgccagcaacgtcgccgccgccaaatgcccaccggccgattcgccgaccacgaacaccggcaggccggcaaattcatcggccgtgagcaaccaacgcgccgccgccaggcaatcgtccatcagcccttcgaccggcgtgtcgaccgccaaccgataatccaccgacaccaccgccacctcgcaggcgttgaccatgcccaggttgaggtcgtcatccatctgcgcattgccgattacccaaccgccaccgtggatatccagcaccacacccttgggcttgccgctcggccgcaggatgcgcacgggtacggagtcaaccaccttgcattcagcagccggcgctttcttgagcatttggctggtgcgcaacagcgcctggatcaggcgcggtgtgacgcgattacggatcttgaagcgcggcatccaggcaagcttctggttgaagcgacgcatctcggccagttccggctcactggcgggccagggtgtataggccatcaacggttattccgcaggatcgagaagttcagcgccgccgccacgcacagccaggcaaggtaggggaacaggatcaagccggtgatcaaatccagttgcactgccagtaccaccatggtcgccacggtcaaccacagcaccgcaataatcaccatcccggccaggatgcgatgggcgccgaagaacaccggcgtccacaaggtgttcaaggcgatctgcgcggcccacaaggccagcaccatttggctgcccgggatgaggctgaggcgataaccggcccaggccagcaacaggtaaataatcgtccacgccaccgggaacaaccagttgggtggggtgaagctgggtttgaccagggattcgtaccaggctcccggcttgaagatgatgccggtactggcagcggcggcgcaggcgagcaggaagatgaagaaggtcatgggcggtccttggctgtcgtcagcggttgtgaggggaaggcgttgtccgtgctttatcaatgactcaaacgctcgcgcaaaaattcaatcctgcgtggcaaatcgcatacaacagcgctcctacttcatgtcatcaaaattcgctaaggtgcttcgacaccctaacctgtttgctcaccagcgagatcgcctgccttgacccatgcctccaccccaccctggaaggtgttcctgatcttcctgcgcctgggcctcacctgcttcggcggcccgattgcacacttgggttattttcgcgaagagttcgtggcacgccgccgctggttgagcgagcgcagttacgcggagctggtcgcactgtgccaattcctccccggaccggccagcagccaggtgggcattgcgctcggtttgtcacgggcgggttacggcggcgcattggctgcctgggccgggttcaccttaccgtcggccctcatcctgatcctgttcgccctgggcattgcccaccacggctcggtgatccctgcgggggcgttgcatggcctcaaggtggttgcggtggccgtagtggcacaggcggtgtggggcatggcgcgcaacctgtgccgaggcgtcgcccacgtcatgctgatgctgatagcggccggtgtggccctgctggaaccctccgcctgggcccaggtcagtgtgatcgccgccgcaggcctggccggcgtgatgttgttcaaacccgagtcgagtgccggacatgacgcgctgccgatccccctcagccgccgagcgggggcgctgtggctgggcgctttttttggggtattggtgggcttgccgatcctggccgactggctgcccaacaccaccctggcgctgctggatgccttctaccgcaccggttcgctggtattcggtggcggccacgtggtgttgcccctgctgcaggccgaggtggtgccaacgcactgggtgagcaacgacgtgttccttgccggttacggtgccacccaagccgtgcccgggccgctctttacctttgccgccttcctcggtgcctcgatgaaccagccacccaccggctggctgggcggcgtggtcgccctgctggcgatcttcgccccgtcgtttctgctgatctttggcgccttgcccttctgggccagcctgcgccgcagcccacgcacccaggccgcactggtcggagtgaacgcagcggtggtaggcctgctgctggcggcgctgtatcagccggtatggaccagcgcgatagtgaccgggtacgaccttggcctggcgctgctcgcattcatcgccctgctagtctggaagctaccgccgtggctggtggtggctggcagtgcagcgctgggatgcctattgggataaccccggctccacaattcgcagccatggccagcgcgcctgataactgcgggccttctgcacaaacaacgccggctccggatgcagcgggttgatgcgcaacacgccctgctccacatcctccaacccataaggcgcatacacctcgcccgtggcaatctccaggccgatgcatgtgcccgccaccaggtaacggtcaatcccctgcctggccgtgtgcaactgcgggtaaggccggccaaagcgctcgccgtaccacagatgcacccgcgcctggttcttcacctcgacattgacgcccaggtcttggaacaagcgctcggccgcacggatgactgcgtcttcagcctcgtaggacaggtcggtatcgaagtagaaaacgtcgtagtcctttacgccctgggccgccggcaaattcgagtgatgattccacaccgcctggaacaggcagcccgccgtgaggaagcactggtccacgcccaggtcgggcaggcgcgcggtgatttcggcgttgatggggttggccatggccaggttgagcagggtttcgacagtcaatgtcatgggctctccgttatccgtgacgcgctcgaacggcagaggttacaccacggcgtggagggtttcgtgacccgcgcttttcgatctcacgcgggatcagcgtaaaccaggacttgcggcagcaccgcccttgcccccccttcaatgagaagcttcagcctcggtcagcggctggcgcttggcccactccatcagttccagattgggaatgtgaataacgccatccacacgaataatgtaattgggccaaggaatatccacccccgccctctgcaaattggcaatgcgccccgccgcatggcgatcgaccttgtagcaatcgaacgcatactttgaagtctcgtccttggaattgtattgccggtacttcaccacaacggtgcattttttctgcggcaggtccgtaacctcgctgagttcagcaacgctcgcagggatcagcagcccgttcgttgcattcaccaggacctgctcgctcgccttgatcagcctatgccctttcgggatgttgaacagactcatgtccgggcttttgtcagcggcggtttcaagcaccagccccgtcaggatggccgcacgattgccgacattcgtcaccaacacctccatccggtcaaaatcgctgtaagccagcgtgatgtccagttttgaatagtcccctttcaaccaactccaggcgggaggaacaaccacagaggctatagatacaagggccactggcagtccgaaaagcagactcaaccgttccagcttgcccttagtcaacttcttcactcgattccctcttacacataggctgatgtcacggccagatagtggcacttaaccatcatgccatgccttggctcgaccatcagccgcctgagaggggtgttttcacgcctgcaactcacccgcccgatgcgccgccgcgtcgtcgtacaccacatacaacgactcggcgacttggctcttgatggccttggtggactcaaggcccagcacaaaaccctcggccttgccgccggcgcgattgagttcttcaggggtggcggcgccggtgatggcgtcgaacagcttggtggcatgggggctaacgcccttgggcaggctgatctggtcgatggacatgggcgataccttaaaagagagaattcggtagcgcgtgcaaccactgccggggtggcatggtagaccggctggctgagaaagggggctttttcatgaccctccccacaccaccgtgatagcgctaagctacatccccctcccgccccgcaggcccagcaccatgaccctctcccccgacttcaccccctgggcctcgttgctcggcggtgcactgatcggcctcagcgccggcctgttcatcctgctcaatgggcgcatcgccggcatcagcggcctgctcggcagcctgctggccaaacacgctgaaggccgcgctgaaaagggcctgttcctgctcggcctgctcgcctcgccctggctgtggtcactgttcgccagcttgcccggcgcgtcgatccaggccggtggcgcagcgttggtgctggcggggctgctggtaggcctcggcacccgctacggcgccggctgcaccagtgggcacgggatctgcgggctgtcgcgcctgtcgctgcgctcgctggtggcggtggcgtgcttcatgggcagcgggtttgcggctgtctacctcatccgccatctgatcggagcctgagcatgcgcaaactgaccgccttgatcgccggcctgatcttcggcctggggctgtacctcagcggcatgaccaacccggccaaggtgctcgggtttctcgacctggccggcgaatgggacccgtccctggcgctggtcatgctcggcgcgctcgccgtcagcagcgtgttcttctttttcgccaggcagcgccgcaccgcgttgctgggcgcgccgatgcagatgccgaccaagcgcaccctcgaccgccggctggtgctcggcagtgtggtgtttggtgttggctgggggatcgccgggctgtgccccgggccggcggtggcgttgttgctgaccgggcaatggcaggtaggagtgttcgtgctggccatggcgttggggatgtggctgtttgagcggattgaggcgcgcagattggccaaggcttgaggcgcgggcgggaggttgtgctttatctccacccgcccccggcctacattgaacgccttatcgatcaaccccgaggtcagcccccatggcacgcatcgtccggattcacgcctacggcgacgccagcgtcttgaaactcgaagacgtcgacgtccccgcccccgccgccgatgaagtccaaatcgacgtcaaagccttcggcctcaaccgcgccgaagtgatgttccgcaaccacgcctacctgcaagaagccgaattccccagccgcctgggctacgaagcggccggtgtggtagtcgcggtcggcgccgatgtcagtgacctgcaggtgggcgacgccgtcagcgtcatcccaccgctggacatcgcccgctggggcacctacggcgaagtcgccaacgtgcccgcccacctcaccgtcaaacacccgcaaaccctcagcttcgtacaagccgccgcgtgctggatgcaatacgtcaccgcctggggtgccctggtggaacaggccaaactgacccagggcgacaccgtactggtcaccgccgcctccagcagcgtcgccctcgccgccttccagatcgcccgcagcgtcggcgccaccgccatcggcgtgacccgcacccgcgccaaacaacaagccctgctcgacgccggcgcccaccacgtcatcgtcagcgacgaagaagacctggtggaacgcgtgatgcaactcacccacgaccaaggcgcccgcgtggtgttcgacccgatcggcgggccgggttttgaagccctcacccaaagcatggcccagggcggaatcttgctggaatacggcgcactgagtgccgagcccacgccgtttccgttgtttaccgtattgggcaaatgtttgacgctcaaggggtatctgtacgccgagatcgtcgccaaaccggcggcgttggcgcgggccaaggcgttcattctggacgggctggcctcgggcgcgttggcgccggtgattgcgaagacatttgcgttggatgaggtgcaggaggcgcatcgttttttggaggcgaaccagcaggtgggcaaggtggtggtgacggtgtgagggcggtgtcctaggacatttcccaaagcagggcagtggcttgcccgattgcctacgcctgcgtcagaatccgccggcttgtgcgctggggtggtggaatctatggttgcgcggtcgctgaatttttcggtgatcgggtttagtagcccggatcggttatctgaatgtgcatgagcttcatcagtcagacatcacgtctgtgcttgatggcggctgtgcgcagggcgtcctcggacgcgccggctttagatatccaccggtctactaacctgcgtacagctgccacccactcgtttagtagcggggaggtggtggcccaagtcaggatatctttatgcctcacgtcatgcaggattcaaccgtgctcttctgcgttgctccagacgcaagcaatgaagccctcattgccaatagttacgaaaccttcgcctctgtcagtacccttctgctcgatctatccgaagatctgagcggcaaacatcgagatattgcactggctatccaccaattgagtgaactgggcgtgttactcacagccaagctccttgatcgtgaggcgccctccgcgggctgaccatagctatccagaagacgaggcaggtcagtggctgagtcgaagtatgaaaaatgggggcggattgatccatgaagaatcaatttgtccccttttcagtggactcaaaacggcctttgatgaatggctactctcggccaaaagctgacgatggctacaggcagaaatcgacccactgctgccgtctagatcagacgtgatctttgttggagcgggcttacccgcaaagaggctacttgagcaacacacatactcttcgagcgatgtcatctgcgccatcgggaatgtccactgaaatgcctaaatagtgttcaaggtgcagggtgagcgtgtgttcatctaccaacagatcccagtagcgctgatcttgaccatcgagcctctctttccagcaacctcccagcccttgctcaagaacccgggccacgtcctcgaaaagcgtccagtcggcttcttctgatacttcaatcctcaccatgcgtcacctcaccaccaaaagtcccccgattctggtggctcctgcgaatggtcgcaatgggtcgaaagtcgtcaatcgcgaagcgcagctattggccgtgagctgcggtacgcaactgaaagcttccggcccaaaaaagcggctccgaatcgccgaatgaaggctaagaaacctgatcacctatcactatgaggggttctccgaaggttacatcagatagccgagtagcctcagctaatgcccgtaaaggggcaggcaaatcgaaaagtgtcagtggattcagtgggcggcattgcagctcataccccctcaaggcctggcgtgaatcgcgatgaacgtctgaccagtcgtacgcgaagaacccacgtttggcaaattcaacgaaagcgtttacgccagccctggcagtgacccgatctacatcggacacctccggcaatgaaaggacaaattcttcggagttttcgacggagggcattgcggaatcaggaaccggccccggcccacccgtagtgaagagcgcaacctgcccgagggcgtcggtggcgacccatccaacatcaaagtcctggagaacgaagggagccaccatttgcacctactttataaaaagggacgagttgatttcctaactctacttcccagcccggagtgtgtaaaagcgcgtcggcaaactcttaaagcaggaagaaattcgacgagttcattatcccagctttaaacatccggttctggccgattgctgcccgctacgacaggcagaaatcggccagaagcagcacgtcagcacgagcagaaatcgccagactattcaaccggtagagacaacagactagacactgcgctggcagaaagactgtctcagataaggcgaggccataagttggtggcaatacgctttgtctgtgtacgccatcacaatccgcacccctttgcgataggctcaacgacaagtgttgaaggcgctttccctgtctgaatatcaactacctccaatgcgcaaccggatttaggagctgagtgggtcacttggtagatcccccccgcattagggacgaagctactgatgctcaaacaactcctatggattaacggctgatccgtgttctcacgctccttgattcctgagctgagtgcgctcaggtaaatgcgccgatcaggctggattagaaatcgattcttttcaggttctgacggtgaaacactacctagcacaccggtctctttcgtgtcttggcagtgagcatcgtagtaggcccaatacacttggctgcctccagacatgaattcgtttttcccccaatgagcatcaagggtggcgtgcggcgcattcggtgccggttgctggtagtgaccaacacaaccagtcagaaaaatcgcacagcagataagtatggatttagtcaacttcacaccaacctagaaaaatccagaaatggggacatctggtccgttatcggccagtctggtttaaacaagagagttcgtctcaaacgttgacgatgttatgcggacgattcagatggggccaggctgtgtgaaaacacatttttagaacgattcggccatgggggcattcgaccaggttttgaggcaacatatgatctctaagaatccagcagctcgacgcagctcgcaaaccaaatcaggaagaatgaatgccttcccgtcgccgcctcagtagtgtctgtcaaagtattgcgcatcacgctgcgagcagtctgtcgtacgtacacccacatctgttgcaagccctcaaagcgaccggggaatcgatcgcgacggtggatctaatgagtgcgaccccatacccgaaggagcttctcagtcatccccaccttcccaccgccctctcttcactacgtgatcgttttgaacagattttgaaatctgaaggatttttaataaccgacctcaacgaggccaagctatttttcaaacctgatcgccaataccgtgacgagtattgttgcgaatgccacgcaaggttgtctcattcaagcggccgtaaatactttgcggcagtcaattgcatgggtaaatccattgttccccagcttgccaatatctgaccaatcccctccggtaatgtcttcaatccagatgaaaagcgagctttaaggccaaaagtcggaatacgccgaggatgatctaagcttttgttcgtctagatcgtatcgggggcgatcatgaagcgatttattgaaggtgaggctcggacgcaagtcaccttgctgccggagtgtctggacgattacgtagccgaagaatggagaattggggccagcccacgttatcaataatggtgtgcctccccctattccccctgaccaacccgcttgctgtgggacttgttgttgctgaaattgacatcgccggtacaaccgcgatctgacccactttgcgtcggctacggaatgcacctgttttcttgcggtctgtagcacaacgctgcaaaggactcgcgccatgtcgattcgccccacgctctgcctgttgatcctgccactatttgccggctgccagtttttcccacagacccattacttcaccgcccccgacaacgagccgaaccccgcctgggtacgcatcgtcaatttcacgcagcacgccgatatctaccaatacgaaaacggtatgcgctcgggcggtgtcatccgcagcgggccgctgcccttcatccatacgcaggatcagggcatgcctaaagccgggcagcatttgacgtacgactattatgaaacccgcgtgcggcccggcatcggaacccatgtggggctgttctgggaggggccgcgcactcaatcctgttttgtcacggtgcagttcacgccgcaggctgggcgttactatcagttcagcctgacgtcgggctccagcggcacctgcacggccaggccctcgctgatcgagcgcgataaagcgggggcgggatggcatctcacgcctaatccgcaggtgacttactcgcctgtcggccccaccgccaaaacccactacaacaatagtcgcttcgaggacccggattaccagccacctcccggtctctatccggggatgtagggatcagcgaccaacgccagcaactcattcaccagttcaacggcttcctcctgatagccctcgcggagaattggagaattggggtcagaccacgttttcaagaatgctggtctgcccccaattccgttcaacacaaccgaccagaagtgaacactcgacactagagccaatggtttgagaaagtaccgatcagacaagctaccccgagcacagagggtttcatgcaatggattgttttcccacgctttgcactaaccgcctgatcctgacgccgcttcaattgactgatgcgacggcggtgcagcagttgttcccgcaatgggaggtcgtccggtatctggacaaccgcgtaccatggccatatccacctgatggcgggctgacttacgtgcgtgatgtagctctgcctgccatggcgtcagggcgagaatggcactggatgattcgcttgcgcgctgaacccgagtgcagcatcggcagcatcagcctgtttgaccaacctggcaaccatagaggcttctggctcgctccgcagtatcaggggaacggttacatgcgcgaagcgtgtaaggtcgtcaacgcttattggttcgaaacattattgcgcccggttatgcaggtgcccaaggccgccctcaaccacccttcacgcaagatctctcaacatgaaggaatgcgcatgatcgggacgcgggacggacattttgtctccgggcccatgcaggttgaaatatgggagatgtcgagaagcgagtggctcgctgcagagaatcaagcttgacctgcttcgtccatgtcagtgccggcggcaggggtgattgctgtcactcgcattaggcgcgggcccctcctcgcttcccacgtttgaaccgtctggcagcacggcttgcaacgcctcttacccatcggctggaactgaccgtcagacgtttcagtaaacgcatgcactggcctgcccggaatcgaaccgcgcgcaagacgcgacgcctgtcagcctcaggtcgcgcatccatcaggcatagcttggtagtggccagagccacttttgccccaatcgctacagcgacagccaggaagtacagccaacgatgattcttggcttgatcatgttgacccacaagcgcagacaattgcttcaaatagggcttagcagcagcaagccgcggaatgatgcattcgctcgccaatgccacggtttggctgccgatacgatcatccacaaggcccgcgggaccatccggtttcgccatgcaaaagtggtgggggacatactcgcaggtacttgagagcggcgatgactgcgaaatgtcgcccgataagtacttcaccggacatagcgtttgattgtagtcggcgatctctttgcgaatagcgattacatcctcatcgctcaggacccagcgactcgcggagtaaaaccctttggagtcattcggcgcgaactcgatgaattcgctggcttcaccttctttgatgttggtgaaggtccactgcgaatagcggctccactggcacgacttcaaatcatccagtccattggccttgcagtagtcgtcatagcgtctgatttggctcaacaagtagccgctggcgtcctggatgcctgacgtcgcctccttgagcatggcgttgtcctcgctggcaccgttgtctgctacgaagaacactgcagcgaccaatgccagcgggaaccagaaatggtcgtagatctggcggaaccgttcggtaaggttgaggttgtcatacgcgagaaccatgatgccccagccggtgatggcgcacagcatcaataggggaatcagcccaatctcactgccgagtttccccacgccatggatggtgtagcgcgttggcaggtaattgattgtcgggaataggccgaggcagctcaacacacctggtaggagcaagattcccaagtagataagtaggccctgcctcttgcccacggtataggctgtagctgccagcaatggaatcaccaacagtgacagcatcatcaggtagcccagcgtgatcaccattgcttgatcgggtgaccaatagctgccaatgattttcccagcggtgtcacgttcggtgaagcttgatgacacaacgtccaggccttccaaaatttggtgcaggttgtacgccgcgccatggaggaaggttacgtatgggtagaagaagttcgcgatggaaactggcattgacttaagtccttgaattactggcgcattccttggctatgggaagaataggggtcagaccacgttttcaataatggtagcctgccctctatttctgccagccacctcccagcctcaatccggggatgaagggatcagcgccagcaactcattcaccaatccaaaggcttcctgctgatagccctcgcgccagcgggctgagaaatcctccggcctgccctgctcttcccactcggccaacgccaggccattgataatttccagctcgaaccattggcgctgccaggcggcagcgtcggttaccagcgtggtgtcctgccacaggaactcggtgtgcgcgacaaattggctccacgcaaacagcccgtgtgaagccctttcgccctgcgcggtcaattgcgctttattcaccctcggtgccctcacgtttgcaattcaatccccactgaaatagcgccatgcccataacccgcgccgtggggtaaggcagtagaccctttgcgcaggcaagagaataagtgcgcaggagccttcggaccaccccacgattacacacgggggattaaggcgacggatttggtttaccacgtttacactggcgccttttgcgccactcactcaggcacgcttatcgacccccttacgaatggaatcgacaccatgctcacctccccgcgcccactcaaaccgctcatcggcctcacccttctcgccgccctcaccggctgcggcgcattgacggatgtgcgctccttctccacgccctacgccacgcccaccagcgctgaaaccgtgcgcctgcgtgtgatgagcgatggcatggtgcgcgccgtgcccaattccaactgcatcaacttccgcctgcccggcgcgggggtgatggtggccaaccgagagggctacgcagaccgcaacggcgaaagcctgggcatggcgcccgtgcagcggtcttcggaggccacggtgatgagtgaactgcgggtgccggccgggcagcccatcgcgtttcattacatcggcaatcgttgctacaacatgttcactttcgtgcccgaggcggggatggattacgaattggatgcagcgggtcgctataagtgcggggtgacgctcaagcgcatgttggtcggcaagactgagggcactcgggtgccgttgggtgagagcaagttgtgcaactggggcgataacttctgagccacgtctcgccctcagctgtgcaacggcaacgccaccccgaacaacacgaagaacccgccacagactttattgaaccgccgcccggtgcgcgccagccatggccgcacccggtgcgcggcgctggccaccaggtattcgaccacaaactccaccacggcgtaggtcagcgcgatgatggcggtctgcgtgatgatgtttctgtgggggtcgaggaagggtgggataaacgcggtgaacagcagcagcgccttggggtttgagagggccgagaccaacccttggcggaacagcgaccagcggcgcaggctggtggtagccggggtttccaggctgacgggggcggcgcgccacagcccgtagcccagccagatcaggtagagcccgccggcaatcttcaaggccgtaaacgcggtggccgaggcctggatcagtgcgcccaggcccagcgcacacagcgcaagcaccagggcaaagccgagcacgccgccgctgatggtgaacagggttctgcgactgccgtgcagcgcgccatgggtcagcgccagcaacgcattcgggcctggcaccacggatattccgcagcaggtgatcaggtagagcaaccaggtctcgaagggcatgatcaagtccgcaatgggtggttttggctgctatcttgcaaatgaacaacgaccgtgaaaagcgcataattcacgtcgcagccattcgattaacgaataaaggtcagcaccatgtcttccagcgatttgcagatcgattggctcaagtgcttcgtcgccgtggtggatgccggttcgctgtcgggggcggcccatgaggtgaaccgctcgcagtccgccgtcagcatgcagatgaaaaaactcgaggcggccctgggccggcccttgctcaaccgtggcccgcggcacctgcaactgaccgatgacggccagacgttgctgggctatgcccgtcgcatgctcgccctgcacgccgagacccaggcggcgttttacggcgaggcattgaccgggcgcatccgtctgggggttgccgaggactacgccgccaggtacctcacgccgctgctcaaacgttttgcgccgcgttatgcgggggtggacatcgagctgacctgtgaacagtcgaccgcgctgatcccgcgtgtgcgcagcggcgatcttgatcttgcgctggtgtccagggactcgccgcacacggggacgtttctgttcaaggagccgatggtgtgggtcggctccgcgcaattcgaactatggcgccgcgacccggtgcctatcgccgtctacgaaagcgaaagcctggcacggcggtatgcggtgaattcactggcgcaacagggccgccagttcaaggtggtgtacaacagctccagcctggccggccaactcgcggccgtggaaggtgggctggcgattgctgcgattacagagtgcaccgtgcagccatccttgcaggtcttgagcagcgaacatggcttgggcgctatcgaaccgatggaggtgtcgattctacgtagccgagcttcgcgcggatccaaggcggtcaacagcctgcatgggtttatcatcagtgcgcttagagctcaggcgtagccctggcgcgtcgcgctatctggacaccgaggtgatcccatagcagcctcgctgaagctcgacagctcctacaattgatctgcattcggagctatacatggccctgtccaaacgtgaaaccgttggtatcgaacgccaactggtcgctgcactgactgacgcctgcgaaacggcgaaggctgaaatcccggggtttgaatggctgacccacacggtcaactacgccgacttccctcaaagcctgcgcatcacctgggtcttcgacacccgcgccaataaagaccacgcggtggcgaccgggttggacgcacgcatccgcgaactcacagccgcggccctgcacgacgccgacatcccacccgtgccgttgccgcgctgcgttcaacttgactccgaagaagcctgccaaacccagcacggcggcaattggcgtttgcgcctgacccgctcagccaactagagcctggcgcccaactgctggataatgcctcgccctgctctccgcccgctgaaaaggaaatcccgccccatgaagttgccgctttccgctgccctgctcgcgtctgccctgctgtcgccttcgatggcccacgccgaagacgccgcactggtcgacaccctcaaggccttcacccgctgcgacgcgagttttttcagcagcctgaacacccaccgtgacgcctggcaggcctacgccccgctcaagcaagagaaggacttcagctggatcgcggtgcgcgatcgcaccgaccccaaggccaccgcagtgccggtgagcgcgccggccatcgccggcttgaagttgctgtcgtacaacgatgaggtcagcgatctcggcccgctgggcctgtattacttctggggtttcacggtggacggcaacattgatgaggtcgcgcagcgctttgccgcactgctggaccaacccgctgcgctgcaaaaaggcgaagggcaatacacgcgcagcgagctcaaggtgggcaacagctggcaggcgatcaagccgatgccgggcaaggcgccagggctgcgcaatgtggagcgggtgctgatcgtggagccggagggcacgcactcgcgtgtgagctgttcggtgcagggcggggtgactcccggcttggtcgcactgctgcggccggacattgcgccggtggattacccgcgcacggtggccgagacccatctcgccgacgtgccggtgccgcccactgtgctccagggcctcgacgcgccgctgttgcagcccaggttcaagacgttgagctacacctacctgtcgaagaatgacgcgggcaaggacgcgccgatcacgatccggttcaaggccgagggcggtttgctggtgaagaatgaggcctatggcaacgccttcaatgtggaccgtttaatgctggcagacctgatccagctgaaatcgaaaatgaacggcgtgggcgaaggccaggtgctgcagacccgcgaggccgaggtcaaactaccgaccagttgggcaccgggccagaccctgagtgcgcacctgaagatggccaatgtgccggtcaagcccactgacaaaccgaccgaaaccaccttgacctgcaaagtcggcgagcgcttcccggcgcgccaggtgtttgcgtcgttgacgggcgatgccatccggctggcctgcgagcaggacggctacacgtcgtcgcgcgcgtttatcgaggacctgggggtggccctgacgctggagtcgacgtcgagccagacccactatgtgaatgaaatccagacgctggacgttgtgcgctgattagggctccacgccacgcaagaacacatcgaagcggcgactgatcgcccgttgtgtttagccgcagtcgcactcaacgtgtgatgagccggcttgttgtggtgagcgggcttgccccgcgttgggtggcgcagccgccccaataaatacaccgcattctttcagacagaatgcggtgcctggtctggggccgcttcgcgccccaacgcggggcaagcccgctcgccacaacaagcccgctcaccacagataagtttgaacaaccacagcaagcccgctcaccacaagggattagggggcagttagaagtggcgtatgagcgaaccaaacaggtcgccccggggcatttggctcaacgggatttcggcgttctcgaaccactgcgcactggcttcaggatggggcccgctcagtatcactacgcctttctcgaaggtataccgcgccgctgcgacgtcgccgttgcggtaggtcgcgatggccgtgtagggcgctacctttgggaagtaagggccgtcctggaagaacacctggtcgggcttgccgtcccatgtgacctgcacggcggcgtcggcgctgtcgggcacttcgaaaccggcgcggccagcttcgccgtcgaggtccaccgggatcaagccgaggttgctgtcatccgccaggtaggcgcccatgcacaagcccaggtagcgcccgccgttggccacgtaatcgcggatcgcctcgctgcgcgcatcgcccaggctgcgcagggcgccggggatgtcctggccgccgccgggttgcacgtagaggtcgtagcgcgccagggtttgcggggtgatgtcgatgggctcgtcggcgcccacgaagtcgatgcggtagttggggttgatgcgctgcagggcctttgccacgttttccgaacagtcatcgcagccagccgggccacggtagatggcgacacgggtgataggcgccgaggcttcggccggtgacggcagcaaaagggcaaaggcaaacaacgtggcgacgacagctcgcaggttcatggtcaaggactcctgaaggaccacgcaaagcctatagcgattgcgccgttgaatccgttaacagttgtaaacgacgttgagttggggataactggtggtcgagccccgttccgagagtgcttatcatgtttgaactcaccgccctcatcacctatatcgccgtcgtgatcggcctgttcctgatccccggcccgtccgtgttgctggtgatcacccgcaccgtgcagggcggccgcaaggtcggggtcgccaccggcctgggggtggcgtgcggcgacctgctgcataccctgggggcggcgctgggcttgtcggcgatcctgatgacctcggccaccgcattcaacgcggtgaagtgggcgggcgcggcttacctgatctacctgggcatccgtgcgttcatggccaagaccggcacacagaaggggctgacgttgcctgcggtcacgccgcgccaggcgtttttccaggcggtcggtgccgagttgctcaacccgaaaaccgcgattttcttcctggccttcctgccgcaattcgtgcacccggaagccggctcatcactggtgcagttcgcggtgctgggtttgattttctcggtgctcagtgcggtgtacaccagcctgctcgcgctcgccatccgccccttgagccgaggcatcaaggggctgtccaaactgcggcgctgggaaggaaaaatcatcggcacgctgtttatggggctggggctgaaggtggcgttgcaacagcgttagtcacttggcaaacgcatactccccaccctgctccaccgccttgcgataggcaggtcgggcctggaatgtttctacccacgccgccaggtgcgggtaggcctgcaatttgccctgggccttggcgatttcgccgataaagctcatctggatatccgcaccgctcagctcgtcgcccagcaggtacgttttatcggccagcacgtcgttcaggtaacccaaatagttggccacttccgattcgatacgcggatgcaacggcgcgccggcatcgccgaggcggccgacgtagaggttgagcatcaacggcaacatggccgagccttcggcaaaatgcagccattgcacgtagctgtcataggcagcgctggccgggtccggttgcaggcggccctggccgtgatggcggatcaggtagtcgatgatcgcggcggattcgatcagcacctggccgccgtcttcgataaccggggatttgcccaacgggtggatggccttgagttccggcggcgccaggttggttttcgggtcgcgctggtagcgcttgatctcgtaaggcaggccgagttcttcgagcagccacaggatgcgttgcgaacgtgaattgttgaggtgatggacgatgatcatggcgtgctccgcagggcgagagggatgtcttgggaacagactacgccagcgtccgggagtgccgacaattaaatttcaacgcgacaaacacgcgtggttaccatggggatcgaatccacaggagttccgccatggacctgaagttcagtcacgtcgacatactggtcgaaaacctcgaggaggcctgcgcctattacgcaaacatcctcaaagcacgcatctccaagacctttgtgtgggaacgcggcggtttgcatgtgcgctatgccgtggtgctgatggggcaagagcggttcatgttggtgcagccgattgccgggaatctgcgcgagctgctggacacccacggcgaaggcatgatttaccgtcattgctacaccacgccggacatcgaggtcgcctatgacgagctgatcgccgccggtgtgcagcccgagaatgaaaacggcgtgcccctggcccgcgagaacctgcagtcgccttctggcgggcggattatctggctgcccaagcgcttcgggcacttttccatggagatcctggaagagaagacactcgaggcgtttattgtggaggcgtttggctgatcgacgcccacgccgcctgggccagtaactgcgcgtagtcattcgggctgttcttgacccgcccggacaaccacgctcgggcgtagttttctgccgcgccaatgatcagcgatagcaaaagctcggcgggaatgtggctgaacgcttcagcgcggcccgcctcgctcatccactcggtcaactgccgattgcgctgtttgttgcgggtgagcaattcatccttgaacggaccgttggccacggcgaaacggctctggaacacaaagcgcgcccagtcgggttgcgcgtccacccactccacatagctgcgcaccagtgcctccacgcctgcctgggcggtttgcgcctgcgtcaggtagtgctcacgcaggacggcctggtcctccagcgcggcaaaaaacagcgcggcaacgatgccttccttgctgccgaaatggtggtagatggcgcccacgctggtgtcgcaccgcgcacggatggtttcgatgttcgtggcttcaatacccacttcgttaaagcaggccagggcctcgcgcaggatgctgcgcttgaggtcgctgcgccggcccgggaaggtgcgctcgatcagatcaggtgcgtgcatgaagtcgctcgccaaatgtgcggagtctaaaggtacggcagccgcgagagaaggcatggcttgacactcttgagatttacagaatattgttccgtcacagaatattattctgcaaacctatccggaggaaatccatgagtcagtttctcagcatgttcaacagcgcaggtccagccgccttcagccagatggcctgccaggtggcgccctacttcagcaccatcaaccctgaaatcgccgaactacgcccaggccacgcggtggtcaacgtgccgtttcgcaaggaaatcaccaaccacctggcctcggtgcatgccattgcgttgtgcaacgcagcggaactggccggtggcacgatgaccgatgtgtcgatcccccaaggcgccaaatggattcccaagggcatgaccgtggagtacctggcaaaggccaagtcgaacatccgtgcggtggcggatggcagtggcattgactgggcaacggctggcgacaagatcgtgccggtggatattttcgatgagggcggggtgaaggtgtttacggcgaagatcaccatgaatgtgaagatcgcctgaggccacggcagcaggaggaggacctgacccgatgctgaaaacagcgcaggacaaaatgtgggagggggcttgcccccgaatgcggtgtgtcagtcgctgaatctgttgactggtacaccgcaatcgggggcaagccccctcccacataggatctggtttgtttggaagacagctcagcccaggcggaaccgcgcagtgttgtcactcagtgcctggctgcctttgctcagggtgtcggctgcgcggttcactgcccgcgcaccgtcgagcaagcgcccggcggcctggtcgacttgctggatgttgccactcacttcatccgccgtcgccgcttgttcctcgacggcggtggcgatctgcgccagggtgtcggtcacgtgctgcaccgccccggcgatctcgcccaaacgggtgcccagcccggtgacggactccgcgtccgtcaacgcttgttcacacgcggcgcccatcagggtcaccgcctggctgaccgtggcgcgcaggctgtcgacggtgccggcgatctgcgcggtggaggcttgggtgcgttgcgacaggctgcgtacttcatcggccaccaccgcaaaaccacggccctgctcgccggcgcgcgcggcttcgatggcggcgttgagggccagcaggttggtctgttcggcgatgccgcgaatggtgtcgaccaccgattgaatctgctggccctgctggctgacttgctccagcgcatcggcggtgtcggtcaggcgttggttgagctgctggatgctggccgtggtgcgctggctatcgcggctgctgtcttcagcaatacgccgggtctgctgggcgctgcccgaggcctgttcgcagcttttggcgacgcccagggaggtcgccgccagctgggtcgcggcggcggcaatctggctgatttggtgttgctggtcttcgacttcggtgagggtgctgcccgattgcgaattgagggtaagcaccgccgagccgagctgctgcgtctcgtggttgacccccagcagactggtgcgcagttgcaccaccgccacgttgagcgcggtgctgatggccgccagttcgtcgcgcccttccaccgccacctccacgcacaggttgccgtcgcgcagggactcggccagggtggtgatgccgctggcactgcggcggatcgaagcttgcaggcacatgaacaggtacaacgcggccagggccagcaggctgaatgtcgccgcgacggggacgaacttctgcaacgagcgatcgcggtagtgacccaggcgcgcatccagcgaatcgagggattggttgcgcagcgcacccaggctgtcaagcatgccgtcgacactggtttcgaaggcggcggtgtcgagcttgatggtgccgccgaacacgccgtcgtcgagtactttgagttggttgtccaggcgttgcaggctggtgtcgtactgggtggtccagggttccaggccggcgtacggcttggccttgagcgatgccgccgccttgaccaactggtcgcgcgcatcgccgatacggccgcgcaggtcacgcatctgcaaacggctttgcaaggtgaattgccccgaggcgatggacgactggccgacactggccatgcgtccgatgcgctcgatcaggtccggtgtgtgctgggtggacatctgcatcaacaggtaggtttccagccatgggtcgaggatcaggccggcgtccagggtgatctgttcgcgcagggtttgcatggcggtcagggccgaggtgaaacggtcgtaaccgtccggccaccagcccacggtgcgcagggactgggagtccatgcccttgaccgtggcctgcaacgcttcgaagcgagccagcacgtcggcgccggcatgctgggccttgagtgaatcccccagggtttgcaggctctgcaggatcagcgggaaattcgcatcgaccttgtccatcgccgccttcgccgccggcgtcggggcgtgcaggatgtcggcggctttccagcgcgcggccaggttgcgctgcgccgtcaactggccgtccagcccatccagggccagcagttggcgaacgccggattgctcgctggaaatcacggtcagcttgtcgcgatagtccgcgccgatcatccacaggctgcccgccaggggcagcatgaacaggaagaacagaatctggaacttgcgcgcaaagccgaaccgccccagcaggcggatacccggtgataaaaggctgtgcatgtgcaaacactccccaaaaacgacccaggcggtgcaccgctgggtgaagccttgaaatgactaacggcaaaatgccatgtcattgattagattggctcaagcaagatacgggccgttgacagaggggctggagacaggcgggctcgcgaggtgagggtgcaggtatcgtgctcgaaaatggggcaaaagcactcagcattgaagacccagctgtaactattggcgcagtctgtaataacagcggaattacttcccgctgatcagcacttttctccccgctcacactgaaatctcctaacaccactggagattcatcatggcacgtgcacttaacagctccgaacgcagaaccttccgtgcagctcgctatgccgcgttgcgctcgctcgaattcaccattcatcacttgaacggcggcaatgccgatgtcgctcgggtgtggatgggcgtccagcaacctggaaacctgcaagccttggctcaacgtctgtaccggatttttcaggcactgcagaacattcatgaaggacaggtcaactgcgaacccaacgcaaattggtatgcagaggtccaccccgacgacgcagggcatcacatcacgctggggggtgcattcttcaacgccccgacctacggcaatgactcgcgtgccggcacgttgatccatgaaaccagccatttcaacgatgtgcttggcaccgacgaccacgcctacggccaggaggcctgcctgcgactggtgcaacaagccgagcaaggcgatggcaacctgcacactgtcctggccaacgccgacaactgggaatacctggtggaaaacacctattgagttgcggcagcgacactcggaaaaagcctgttctcggacaggctttttcatccccccactatcaggagttgaacatggaacgtcgattattgattggcgcctcgctggcagcactgtacctgttggcaacaccggcacatgcgctcagcactgccgacgctgaacctgaaacactgaaagcgtatgccgtcacactgaacgctcacgcgagcaagttccagtggcagcaattatggaaagcctcacgtgaacacggttatttcaacaacggttctgctacgtatttcacgacaccgatgccgcacgtgcccgacctggtgtccgccgtcctgaataaggcaacgagcgttaccccctttgcctcaactcgggccacttaccgctatgactttgcggcaaaagtaggtttatccaacaacgtggccgtcacagcgctgtgcgttgatgtggactggcgcacgctacctgatggaaccgatgttgaaaatgcgcacgcgatgcaatcggtaaccctgttgctcgcccaaccctgcccatgatgcaagcagccacccgggatgtccccgggtggctgtatccagagtgttacaacgcactcgccaacaaagcagcttccttgcagcgtcgggtggaatagcgatcgccgaaattcctcaagttgctctcggctgctttccagtccgctgccacaacttgcgcccaaaacttcggcgtacggctcgcaaggttgccgtactggaaggcaaccgaggcgatcacggtttgcatcggcgccggcaatgcatcaaacgggcgtccggcagccttgctgtaatcactggccaggcgctcgatgaagggcgccttgtaggcctcgtcgatcctgcatgcatcctgcacactgacattcaacggcaggcgctcaaggcatgccacggcttgcgcaccgatcaaccccaagtagggtaaaagccgctcgctgagatcctggggcagcatgtccaggttcttttgctggcccaggtcaaagccggtgccgatggtgacgccgctacggctgttttccggatcaggcacgtaaccacgggtggcgctaccgccttcgagccgggcaatgaaggccatatctattgaattattggtcatggtgagtttcctcttggctttaggaaactgcagtccatcactcacgccatccgctcttcagaaggtaaaacttcctcatcttcataggtaaagtttcctactgattattcgcacgcattacttcctaagctctgaccagctctcatcacaaggaggttaggccgatggaatcgaaagacctggaacacatcgatgttcgacaactcccccattcccttcagatgctggttgcctgtatcggtctggaaaacgcattccgcttgacttgcgtatatggcggacgccccaagtacatccccaaacacgcacaacgtacttcgctggcgctgattttatcgccggaagccttacaggcgttgatcaatgatttcgcaggtatttctttagagattccaaagtccgatcatttttttcggcagattcgtaatcagcatattcaaatgggtatttccgatggcgtatcacgtagtgcactggccgagaaatacggactgagcctgcggcaaatcgcgaatattcgacgccaggatatttgtattcatcggtaattacttcctactgaatcagaaagtgccacatggatagattcaagttgcgcactttcgcgcactcacgataaggaaattaaacatggcagatattgataaaggtctcattggaggcgtgatcgccgcacttccactggacaagatgatcaccgggccgctgatggcaatgatccaggcacaagtcgccgccagtaaagcgtacgcggactttctcatgggcgtgtgcatccaggacggcaaggccgtttcggtgcagttcgactatgacgaaaccctcgtcgatgagcaggggatctacaagggcacggtcagcaagaccatgcgcattccactgctggccgcaatcagccaccccaacattaccattgaggaaggcagcatcgagttcgagttgaccatcacccaaatggccgaggacactagctccaatgatgtttccggcagcttcgacgccaagatgggctggggtcctttcagcgtttcagtcaaaggtgccgccagccacaagtcatcccaaacccgcaagactgacacccgcgcacgctacgaaatcaagaccaaaatcgttcgccaagacccgccggaagccttgatgcgcgtcatcgatttcctcaccgatgccgccaccaagccggtcaccctgccgagcgccaccccaaccagcccgacagagcttccaaaagcaggggtactgcctatgcctgacgccaaacctgcggaaaaaaccaaatagtcccaccccgccccgccccccagggcggggcaacccacttgacttgaaaggagctcaccatggcatttttttcgcgccccaaggaacccatgtcggccagcgacttgagccacataacacgcgggctgcaacaggccgctgcggccacgcacaacctgatcgtccatcaatatattgcgctgttcgaccagttcttcgattacaacgttgaagacctgggcacgccgatgaaggccaagatggttgaggtctcgctgaccgaggggcataccatcagcgtgccgctgatcgcactggtcgcaccgaagggcttggcactgcacaagatggatgtagacctgtcggtaaaaatgcacagcaccgaagtgcaaaaagccagccatgacctggagaacggcgacctgcacagcgagaagtttttcgtgacctttggcaccactaagcgtgagggtcaagagcgcgatcccgatgaggtgcagatccgtatcgagttcaaggcgtgcgagccaccggaggcgatcaaccgaatcatcgaggagtacaccaacttgatcagcccgatggcaaacgcgcccggcccttcctccgctaccggacaacccaccgcacaacccccttcggacttcgcaccctaaaggccatgcctttcaaggtctttgaaaaaccggcgatgtctggctgatagcctcccattaagagcgagcactgcaactgtggcaagcccgctcgccacaaaggacttatcgcctgttctacctaaagacttgaaagggctgaccctaaaggcgttttaaagggcctattgcgtcaccctgtaccggtcgaaattattgatgtgatcatccagattatcctcaagcatcatccggtactgatcgcagaagtacttcaacatggcctcccgtgcatcggccatttcagctccggacttgaagttgcgtgcactggcccaggcattgaagcgcgtggtgccaaacatcatcgaggcgctgacctggccgaggttttcgtgggtctggagctgctcgttcgacagctcgatatgcgcgtcggcgcggtcgtagaaagtggggtcgatggcgtctgccatggtggttttccttggtcatcaggtttgaatgagggtagatcaagccagcagcgcggttatccacctggcctgtcgggaaatctcctgccacttgtctggcggcactgcctgccgcgcctgctcgaagctggccagggtcttgtgcttttgctgcaacaggcgctgccacttggcaaggaacgccgggctacgcgcctgcatttgcagggggccgaagtacagctgttcggcggtgtacgccaccggcccggtgcgctcggcgacgatgatttcgtagtagaaacggttctcgcgcagcagctcttcatggaggatggagtaaccgttgtgcatcagccattggcgcagcgcttgttcgccaccgttaggttgcaggatcaggcgttcctggccgctcaggtgcagtttgccgttttcaagaatgtcgcggatcgtctcgccgcccatgccgcagacgctgatggcggtgatgccgtcatggggttcgatggccgccagaccatcggccaggcgcacggtgacctgctgctccaggccgttgtcgcgcacggtacgttgcgccgcatgaaagggcgtggtcgcgacctcccccgccagcgccgccgtgatcgcacctcggcgcatcaacgccaccggcaggtaagcgtgatcggaaccgatgtcggccagtcgcgcgccagccggtacgttggcggccacgcgctccaggcgctgggataaggtgtgttcgttcaacggccctgctccccggaaaaccgatcgcggctgttggtcaggtgcaacaccatggcggcgcgggcggcatccgggtcctggcgcttgaccgcgttgaagattgcctcgtgctccaggttcgccaactgccccagcttggcaaaatcggcgccgccacgttcatcgttcttcacctgggtacgcgggatcatcgcattgcccaggtgcagcatgatttcggtgaagaaggtgttgccggtggcctcggcgatcagttggtgaaaacgtttgtcttcctccacgcagctgtcgttattggccagggaagcctggtagtcgtccagggcctggcgcatgtgagccagttgggcgtcggtcctgcgaaccgccgccagagcaacggcttgtacttcaaggcccaggcgcaactccagcatgttgcgcacgctggccaccgtgtccacgtgcaagcgcaacccctgctgggcctgctgctccaacacaaaggtgccaataccgtggcgggtctcgaccaggccggacgcctgcaacttggagatagcctcgcgcaccaccgttcggctcacgccgtgttcgcgcacgatggtggattccgagggcagtttttcaccgggtttgagttggccgagcaggatgcgctgggtcaacgcgtcgaccacgccttgggccaggttggtggagcgtctgcggacagagcttccattatcgatgggcatattacgtgtccacagggttgagcagcggcaagcttaacattcccacctgcccgtcgcgtcttcaggatgtttgatgtcaaaaaaacaatccacttgtatgacaacacactaaaaacgcattttaaaaatcaaaaaaccccaatactgttgcgaaaaaaataaatcaacttgtatgatgtctatcaacaagacacacacacccgcataaaaacaatcagggggagttttgaatggtgaccacttcaagccacgcatctgccacacccgaaaatgatccagtcctcacgcgcgccgtgagcaaagtgaagggccatgtgctcccactgttcgtgatcatgttcatcctcaactacatcgaccgggtcaatatcggctttgtgcgcacgcacatggaacacgacctgggcatcggcgctgcggcctatggtttcggcgccgggctgttcttcatcggctacgccctcttcgaagtgccctccaatatgctgctgcaaaaggttggcgcacgtatctggctgacccgcatcatgttcacctggggcatcgtcgccacgctgatggcgttcatccagaacgaaacccacttctacatcctgcgcttcctgctgggtgtggctgaagccggctttttcccgggggtgatctattacttcacgcgctggttgcccggtgtggagcgtggtaaagccattgcgattttcctcagtggctcggcggtcgcgtcgctgatttccggtccgctttccggcgcgctgttgcagatcgaagggtttggcttgcatggctggcaatggatgtttgccattgaaggcctggcctcggtggcgctggggttctttgtgtggttctggttggactccaaaccccacgacgcccaatggatgacccgcgaggaacaggacgcactggtcaatgccatcgaccaggaacaacgcgaccgcgaagccctcaccagcgtcaagccgaccctcggcaagctgctcaaggaccgccagatcctgctgttctgcgcgttgtatttctgcatccagctgacgatctacgccgctaccttctggctgccgagcatcatcaagaagatgggcgatttgagtgatgtgcaggtcggcttcttcaactcgatcccgtggctgatctcgatcatcgccatgtacgccttcgcctcgctctcgggcaaattcaagttccagcaggcctgggtcgcggcagcgctgttgattgcagcggcggggatgttcatgtcgaccaccggcgggccgatcttcgcgtttgtggcgatctgttttgcggccatcggcttcaagtcggcgtcgtcactgttctggccgatcccccagggctacctggatgtgcgcatcgccgctgcggtgatcgcgctgatcaactccatcggcaacctgggcggctttgtggcgccgaccaccttcggtttcctggagcagaccaccggttcgatccagggcggcctctatggcctggccggcacctcggtgctcgccgcgatcctggtgttctttgccaagacgtccccctctgccgcattgaagccagcgagcggcgtgcccaccgccgctctcggcaaaccactttgagcccagtcaggaacctgccatgaatactcccgtcgttacgcacttccaggtcatccccgtcgccggccacgacagcatgttgctcaacctcagcggcgcccatgggccgtacttcacgcgcaatatcgtgatcctcaaggacagctcgggcaacaccggcgtcggcgaagtgcccggcggcgagcgcatccgcgaaaccctggaggacgcccgcagcctggtgatcggccagcctatcggtcagtaccagcgcatcctcaaccagatgcgcagcgcctttgcttcacgcgacgctgccggccgcggcctgcagacctttgacctgcgcattactatccatgccgtcaccgccatggaagcagcactgctcgatttgctgggccagtttctcgaagtgccggtggcggccttgctcggtgaaggacagcagcgcgatgcggtgaaaatgctcggctacctgttctatgtcggcgaccgcagcgcaacccccctcgcctaccgcaacgaagccgacagcgacgatgactggttccgcctgcgccatgaaacagccctgaccagcgacgccgtggtgcgcctagccgaagccgcccaggccaaatacggtttcaacgacttcaagctcaagggcggcgtattgagcggcgatgccgaaatcgaagccgtcaccgccctggccgaacgcttcccggacgcacgcatcaccctcgacccgaacggcgcctggtcactgcaagaggctatccgcctgtgccgcgaccagcaccacgtactcgcctatgccgaagacccctgcggtgccgaaaacggttactcgggccgcgaagtcatggccgaattccgccgggccacgggactgaaaaccgccaccaacatgatcgccaccgactggcgcgaaatgggccacgcgatccagttgcagtcggtggacattcccctcgccgacccgcacttctggacgatgcagggctcggtgcgcgtcgcacagatgtgccatgaatggggcctcacctggggctcgcactccaacaaccacttcgatatttccctggcgatgttcacccaggtcgccgccgcagcgccgggcgatattaccgccatcgacacccactggatctggcaggacggccagcgcctgaccaaagcgccactgaaaatcgaaggtggttacgtgaaggtcccaagcaaaccaggcctgggtgtggagatcgacatggacgcggtggcccaggcccacgaagtctacaaaggcatgggcctcggcgcgcgggatgacagcgtggccatgcaattcttgattccggggtggcgcttcaacaacaaacagccgtgcctggtgcgataaacgcccacccactgtagaagcgagcttgctcgcgaagatcgccaacgaaaaacgcgccccccccctgggtaaacgcgctgcctaggttttcttcgcgagcaagctcgctcctgcaattggctgcaccgtcagctcgacgcccaaggccagcatcagcttctggatcgtttcatagcgggtcttcgagccgcctttcaacgttttatacaggctctcccggttcaccccagcggcctcggccaccttgttcacaccttgggccttggcaatctcggcaagcgccttcatgagcacctgcaggtcttgagccttcatgctctgcgccagatacgcactgatggtttccgggctgtcgagaaagcgcgaagcctcatagacgctggttccggacgtatccagatcgaggatcggcatgtcctcgggtttgaatttcgattcgctcatttcatttacctctcagggcatcgagaatctcttttgcccgcttgatgcctcttttctggtcagtcttatcactgccccacagcatcaagtaagcggtgatccccgtacgcacgaaatacatcctgtaaccaggcccgacgaacacacgcatttcactcatgccgtcgcctaccgattcacaatccccaaaattgttttcctccgctcggtccaagcgggtcagcaccgccgttttcccccagatatcccgcataccgtcgagccatgtatcaaactccggcgtcctgccgattaaattagtcacagtatcacttgtagcctacaggctaccccttgtcgatgccaatggatttttgtttccggtgagcgccggaataaaaaaccctagttcagcacccgcacaaacatcggatggatactatgagtgcttgtttccccagtgtttaaagcacccgatcaaacaacggcgccacgtcataccgctgcttcaacatctgtgcatccaccaaaaaatccgccgtggcctgggcctcgctgacaattgtcggcgagatcggcagcaccttgatcgcatcgcgcttgaaccacaccttggcaatctccggtgccgactggttggccttggaccaggcttcggcgtattcatcgacgtgggtgttgctccagactcgggcgcgagtcaggcgggcaatgaagtctttgatgatcgcgcttttctgcgccagggccggctcgtacgccacgatgtaggtcggcgcactcatcaggcccttggcgttgcggatcagggtgctgccttctttttcctgcagtgacacgtagggttcccaggtgccgaaggcgtcgatgtcgccctgggtcagcgccaggctggcctcggccggcagcaggtatttgaagttgacgctgctgcgcggcacacccgcttcatccagcgccttgtacgccagttgctggctccatgagccgttccagatggcaacggtcttgcctttgaggtcggccaccgagtgaatgcccttgcgtgccacaatacccacgccgtcgaggctggtctgggtgctggcgacgactttcaccggtgcgccgttggcggccaggctgatcaccggggtgtcgccgacgatgcccacatccagcgcgccggtggccacggccgaggccaccggggagccggtgttgaagcgcttgaagtcgattttgtaaggcaagtccttcagctcgcccgacagctccagcacgatgcgattggagaagaactggtcacccacgacgagagtcaacggctcagcggcgctggccgacggaccatagagcgcaagagaggccacgcccagcaaggacagcagtgttcgacggttgatcatgaaaaatcccacagggttagagggttggtttaaccatctgtgggcatgcagtctggtcgcttgaggtagaagctaacgcaataaaagcgcggggtttaatactgttgggcactatcgatagaaccgtcccacaggtcgctagttgcttttcgtattaaaaccttcgccgcccctgggttagggtgacgtcaccagaccactggaccccagcacctgaaccactttcagcaaggtccattgcatgtcgattcccgctttgaatatctggggcgctccgcccactgcccgctacgaacaattggccgcgccgtttcgcccactgtttgcgcagattctcgcgcaggccgccgaggcggatcagacacgcgccagcctcgccacggtgatccagcaactgaatgccctgggtttgccacgctggcgcctgccggccagttatggcggccaggatgcgagcctggtcgagctgctcacgctgctcactgaactgtccgccgccgactccaacatcacccaggccctgcgcggccactttggtttttgcgaagacgtactcagcgccaaggacctcgactggcgcgccaagtggctggaccgcctcggccaaggcgccctgctctcccccggcagcaccgaagtcggcaacggagcccgtggcgacttcgacacccgcctgcaccgcgatgccgccggcgcattgcgcatcagcggcaagaagttctacaccaccggcgcgctctacagcgacctgatcaataccattgcaaccggtgaaaacggcaccgtgtatacggttgtcgtcgacctgaaagccccaggggtaaagatcgtcgacgactggaacggcttcggccaacgcctcaccgccagcggcacgtgcattttcgacaacgcaccggtggtggacgacgacgcgcgccccacccaacagcgctttggtcacgggcagtcgttcttccagctctaccacctcagcaccctcgccggtatcgcccgacgcgccgccctcagtggtgccgaagaactcagccagcgcgcccgcaccttcaccaccggcaatgccgacacggcgagccaggacgtgcagctgctacaggtgattggtgaagtcgcgagccaggcctacgccgcgcaagccatcgcccagcaagcggcccggcgcctggagtacaccgcgcagtatgtgattgcccacgaccagccactgcatgacgatgacccgcaggttgcattggccgagctggaagtgtgcctggcggtgaacccggtggtggatgcgacgctggccgcgaccacggccttgttcgatgccctgggcgccagcgccactgccagcagcaaggcgctggaccggctgtggcgcaatgcgcgcaccctggcgaaccacaacccgcgtgtgtacaagtcgcggatcgtaggcaattacctggtcaatggagtcctgccgcctgcgcagtggcgggtgggtgtggcaaaaagcactgacagttagagggcacaacaaagatcaaatgtgggagggggcttgcccccgattgcggacatccagtcactgcattgttagttgacccatcgccatcgggggcaagccccctcccacaggtaacctacacgctcacaaacttcagcacccgcgccaacatccggtcacaggcctgcaactgctccaggctgatgaactcatccggcttatgcccctgcgccatactccccggcccgcaaaccaccgtgggaataccggcctggtcgaacaacccgccttcggtaccaaaggccaccgtgccaaaatccggcgagccacagaactgcgccacccactctgcggcctggctttctggcgacgtggccagccccggataactggacaactcgctgaggctgatcgccgattgcgcactcactgcccgcatcgccggcaacaaggattgttcagcgtagtcgcgcagttgctgcaccacctgccagggatcctgggccggcagcgagcgcacttcaaagtcgaaactgcactcctgcggcacgatgttcaatgccttgccgccgctgatcaagccggtctgcaccgtagaaaacgccgggtcgaaacgcgcatccagatgctctggcgccttgagcgtttcgccgagccgcaccagctcgctgaccagccgcgccgcgtattcaatggcgttcacgcccgccggcgcgtacgccgaatggcacgccgcgccatgcacctggcagcgcatcgccagcttgcctttgtggccaagcaccggtttgagttcggtgggttcgccaatcacacacagcagcggcttgaccggctgcccgtggaaccgctcgatcagcgagcgcacgcccaggcagccgacttcctcatcgtaggacagcgcgatatgcaccggcatgcgcaacggcgcctgcaccaacgccggcacgcatgccagcacacaagcgatgtagcccttcatgtccgccgtgccacgcccgtacaacttgccgtcctgttccgtcagctcgaacggcgccacgctccaccgctgcccgtccaccggcaccacatcggtatgcccggacagcacgaagccgggcacctgcgccgggccgatggtcgcaagcaaattggccttgctcttgtgtgggttgtaaaccagttcacaggccacgccgtggtcttgcaggtaagtgcgcacgaagtcgatcaaggccaggttggattcgcggctggtggtgtcgaaacgtaccagttgcgccagcaggtcgcggctgttcatcggtcatctcccggcaccgcataacccggtgcgatctgcgggttgagggcgcggtcgatgtaatcctgcagttgcccgcgataggcttgccagagttggtcgagggcgcggatcgggtccatatcggcccaatccacgcgcagattgaccaccggccacagcaggtcatcgacgatcaccagcgccgccgaatgcaccggccccgcttcaccaccgcctgtcacaccggcgtgcatcgcggccagcagccggtcggccaggtgccccggggccgcttcgaacgccgccaccatggcctcgatcacccctgcgtgggccaacatgttgcctgccgccacgcagccctcaccgctcactgcgtggtgaatgcccagggtctgcgcaccgctgaaatgcgcggtgcggcccaggtgatcaatcacgctgacctggcgatactcgctgtgatcctgaccggccagggtcgccagtgcttcactcggcgccaggccctgctccaataagtccagcacctgtggccccaggcttggcaaggtgatgttctgcgacgccaccgcgcccacaccggggcgcagccaggggcaacgcgcacccacggcaatgctcgatgagctgatcgcaatgcccaactggcccgtctcggcgcagcgggcgacaacggaaaacgtcatggggtgtcctcagtcgagcacggaagggtccgcggcgatcatcaactgcttcatttcttcgaaatgctggcgcgaaaagtcggcgatgccttcccagccgcgcgcggttttttccgccacgtcatcggacagcactcgcaacggctgcccggtggaccaggccgtgacgaggatctggcaggaacgttccagggtccagatgtcgtcgaaggcttcaccgatggagccagccgtgaccatcacaccgtggttgcccatcaacaagcgcgtcttgccgtcgagcagcccggccaggcgcgcgccttcggcctcggtgtcggccatgccgccgtacagctcgtccacggccacgcggttgaagtagcgcgcagtgttctggtcgatcggcgggatgtgcggcctggccaggcacgccaccgccgtggtgtacaccgggtgcaggtgcagcaccgcacgggtctgcggcagcagccggtggatctgcccgtggatcgaccacgccgtggcatccacgttgggatgatcggcacaggcggtgtcgtctgcgttcagcagcagcagatcgctcgcgcggatacgtgaaaagtgcttccacttcgggttgagcaaaaactgtttgccatcggccgagacggcggcgctgaagtggttggccaccgcctcatgcatgcccaggtgggcgatgatgcgaaaggtcgccgccaggtcgatgcgcgtctgttcttcgtgggataacgccatggatcggactccgcagggcgcggccgcaggcgaatgcggcacgcgcgtgtaggtttacttcggcatcaatgcggcaatgtcggcatcggtcggcgcctggaagttgtacttcttgagcagggcggcgtactccggcgtggcgcggtatttgtccaggccgtcgagcagggcttttttcaccgtgtcattgcctttcttcacaccgaagccgttgagcaccgggtagatcaaggtgtcggacgagatcaccacgcggctgccgagcttgtcgatcacgccccgggccacggcggcgtcggtgatctgtgcttcaaccgcgtgggccagcagcgcctgggtggtttgcgggtcggtgctgtattcgctgatctggatcggcttcaggcccttggccacgcagtattcggtggacagcttgttcatctgcgccagccacgaggtggcgcccatggagccgatcttgtggccgcagaactcctccggggtcttgggctggaagctgctgtccttgagggtcaggatcgactcgccgctcttgaggtaagggatcatgtcgatgactttgacccgctcggcggtgatgtacatcgacgaattggtcacgtcgaaacgcccggcttgcaggccggtgatcaggttgggaaagcgcgtatcgagggtctcgaccttgcggcccatgaccttgcccaggccgtccatgaattcgatatcaaagcctgccggcttgttgttatccatgtactcatacgggaagaacgtcacatcggaaccggcgatgatcttgccgtcctgctggaacgccgaagcggccagcgaggtcagtgcaaccgctgcgcccagcaggcacacggcaaggggacgaacacttttacgaaacgctgtcatggtgattacctgcaagggtttggggggttaggcagtggctgaatcttgtcccgcctgttgaacgaagaacgacgcgccacggggtttctgcggcaagcgcatgtggttgtgggtggaacgcaccaggccactttcttcaccggccaccagcaggccggcatgtgcgctgggcaacgggttttcgccgaagggcagcgcgtcttcagcggcatagacactgatgaacagcgtgcgcggcagttcggtctcgttagggctggaagcatgcagcagccgggtgtgcatgaagcacaccgagccggccgggccgtaacaggccaccggctgctggcagtgttgcgcgaccacgctgtcgtccaccgagccggtgaaacgctggttctgccagtgcgaccacagcgggcctttgtggctgccggggatcacgttcagcgggccgttctgcggcgtcacttcgctgaccatcagcaaggcggtgacgatgtcgtcgttgctgtggggcgtaaacaggaagtcctggtgccacttcacctgggtcgcggtgtggggcagtttggagttgatcttgctgtggtgaaaacgcgtgccctgggcgccgatcagttgcgcggaaatcgccgccatgcgcgagtgcaacgccacgcgctcatacgccggcgaaatctccgtgggcgagctgacccggcgcagcgacgggtggtcggcgcggtggtcaccctccaggtcaaagcgctcacggccatcgacggtggcgccccagccccggtcatgactgcggctttcttccacccattggtcgaagtcatgctgcagcgcggccacttcatccagtgacagcacgccttctaccaccaggaagccgtcgcgctggaattgttcgacttgcgattgctcgatcattttagtgtttcctgaacgttaaacagatcacgccagcgagacgtccttgaggaacgcctccacgcgtgggttgtggccgctgcgcagggcgcccggcgtgtcgtcgcagaccacgcggcccttctccatgaacacgatgcggtcggagaccttgaaggcgaagttcatctcgtgggtgacgatgaccatggtgatgccctcctcggccagggcttcgatcacctgcagcacctcgttgaccttctccgggtccagcgccgaggtgggctcgtcgaacagcatgatctgcgggcgcatcatcagcgcgcgggcgatggccacgcgttgctgttggccgccggaaagctggtgcgggtacttccaggcgtggtcgagcatgccgaccttgtgcagcagcgcgtaggcctgttgcttgagctcggcggtcgcgcccaggcggtggtatttgggcgccatcagcaagttgtcgagcacgctcaagtgcgggaataggttgaagctctggaacaccatgccgatgtgcaggcgatgctcggcgtgttcgacgtactggggtttctgcgcgccgactttgttcaagtgaatgaagggctggccgttgatcctgatctcgccgttatccagttgttccaggccgttgagcaggcgaatcagtgtggtcttgccggagcccgacgggccgatcaccgacaccacttcaccgggctggatctgcagattcaccgagcccaacacctcgatatcgttgtaggccttgtgcaagcgcgtggcctgcaacgccgactcgccattattggccgggcgcgccaaggcggtgcgctgttgggtcgccagggccaacaccgccgcatcgggcatgcgggacacgttgcgctggttgacgtcgagaaagcgctccaggcgtttgagcaggaagtcgaacaccgtgacgataaacacgtagaagaacgccaccgccgccatggtttcgatcaccaggaagttctgcgaatacaggcgctggccgaccatcaggatctcggtcagggagatcaccgacaccaacgaggtgagcttgacgatagagatgtactcgttggccagcgacggcaaggccacccgcagcgcctggggaatcactacgcgccactgggtgccgaagaacttcaggccaagcgcccgcgccgcctcgccctggcccttgggaatcgacagcaggccaccgcgatggatctcggccacataggcggtttcgcagatcaccagcgccaacaggccggaccagaacgggtcggccagcaccgccgaggtgcccggcaacgcttgcggcaggttgtagataaagatcagcagcaccagcaacggcaggctgcggaacagccagatatagccgcgagccggcacgctgagcagaccatgtcgggattgcttggccagcgccagcagaaagcccaggccaatgctcaacacccaggtcagggtactgagtttgatgaccgtccacgtcgcgcgccagaactcggcatcgcccagcaaaccaaacatgtaattccagtcgaatgtcatcgtcgctgtgccctgagaagttgatctacatcgatgggttcagagtcgtggcgggaggcggttggggtcaattcgtaaaagccggggcactgggtaggcagaacctatgcagtctgaaagcaaccaaaatccaatgtgggagggagccccctcccaccattggtgcaggcttgaatcggccgtattgcgcacgccacttattggtgcaacctcagctcacaccgctcaacacccgcacggcatgcggatcaaaaaagcttggcggcgccatgccggggatgtactggtcggacacaaacatgcggcagcgctcggcaaacgccgacaccacccgcgacaactgggtgttgctggccgtggcgtagcccaggcgcatcggccggtgcgcacccgccaggcgcaggcggatgacgcgcttgccgtcctgggacatattcgatttgggccgcgcattcgcgaaggaatagccgatgccattgcccaccatggcgcgcaccgtttcaaggttggtggagcgcatgatgatgttcggcgtggtgccggcctggatgaacaggctgaggaaatagtcacgactccacggcgtgtcgagcagcaccaccgggtaggcctccaggtcctgcatgctcacggccggcgagttcgccagcgggtggtactcgcccaccatcacgtagggcggcagttgcgccaggggttggaagtcgatgtccgggctggtcaccaggtcgtaggtcagggcgatatccagctcgccgctgcgcagtttttccagcagctcttcatggttgccctcggcttgcgtcagccgtacgccgggaaacgcacggccgaaaccgaacaccagctctggcgtgatcatcggcgccagcgactccaggcagcccacgcgcagcggcccgcgcaccgtgttcaaggactccgaggcgatggtgtagaggttggtcatctgttccaggatcagcttggcttcctgcatcaccaggcgccccaccgccgtgagggaaatgccctgggcgtgatggcggataaacagctggatgcccagctccgcctccatatgggtgatcgccgccgagatcgacggcgacgacacgtgaatgcgctcagcggccgcactgatgctgcccgcctctcccgacgcgacgaaatactccagttgacgctgagtaatacgactgagcatgacgcctgcccctcaacaatgactgtgcaggtggtgttgcagggttcgtgccgggtcaggcgcaaaccgatgacctgcatgggcttcggtttttcctaagcactaccccgcgcaaatgctggtttcgccgcaaccggggcggtgtgaagctggatctatcccgcttcccacgagctgccgttatgccgacccacacccgtattcgcatgttcaatacccgacagacctaccccaaccaggcgctggacaacgacctgtgccaggccgtgcgcgccggcaacaccatttacgtgcgcggccagatcggcaccgatttcgacggcaacctggtcggcctcggcgacccgcgcgcccaggccgagcaggcgatgaagaacgtcaagcaactgctggaagaagcaggttcggatttgtcgcatatcgtgaagaccaccacctatctgatcgacccgcgctaccgcgagccggtgtaccaggaggtgggcaagtggctcaaaggtgtgttcccgatttccaccggcttggtcatctccgggctgggccagccggagtggttgatggagatcgatgtgatcgccgtggtgccggacgattgggccgtatgaacacgctgattgcctggagtgccccatgacccatcgtgtgtttttcctcaacgggcccaacgccaacctgtatgggctggataaaaacggcacctatggcagcgaaagcttcgccagcatcgacgcccgctgccaacgccacgccgccgcgctgggcctgaggctggactttcgccagagcaaccatgaaggcgtgctggtggactggattcaggaagcacgcctgcaggccgacgccatcgtgatcaatgccgccgggctcagctacagctcggtgccgatcctcgatgcgctgctggcgttcgacggcccgatcatcgaagcgcacatgagcaatatctggcagcgtgaaagcttccggcaccactcctacgtgtccagggccgccaccggtgtgatcgccgggttgggggcgctgggttaccaactggcaatcacggctgtggccgaattgctaggccaaaccgcctaatgactgttcaggaaccgcctatgtccgtcgaaaaaatcaacaccctggtcgtcggcgcaggccaggccggcgtcgccatgagcgagcacctgtccctgatgggcgtgccccaccttgtgctggaacgccaccgcatcgccgaacgctggcgctcggaacgctgggactcactggtcgccaacggtccggcctggcatgaccgctttcccggtctcaccttcgaaggcatttcgccggaagccttcccgccgaaagagcgcatggccgactacttcgaggcctacgcggataagttgcaggcccctgtccgcacgggcgtggaagtccagtcggtggaacgccatgcagggcgccccggcttcaaggtcaccacctccgcgggtgtgatcgaagccgtcaacgtggtggccgccaccggcccgttccagcgtccctcaatcccgaacatcgtccccgccagcgcagcgctgcaccaactgcattcctctgcctacaagaaccccggccaactgcccgaaggcgccgtgctggtagtcggcgccggtgcctccggctcgcagatcgccgaagaactgcaaaaggccggcaagaccgtgtacctctcggtgggcgaacactaccgcccgccccgcgcctatcgtggccgtgactattgctggtggctgggagcactgggcttgtgggatgaagtcaaaatccagccgaagaaaaaacacgtggcgtttgcggtgagtggctatgaaggcggcaagacggtggactttcgccgactggcccaccaggggattcagttggtgggtgtcacccaggactgggtggagggcgtcatgacgtttcaaccggggttggccgagaacgtggctgaaggcgaccgcgcttactttgacgtactgcgcgatgcggatgcgtatatcgaggccaatggcttgccgtttccgccggagccacaggcctgggaattgttgcccgatccagagtgtttggtgaatccgatgttgaacctggacctggctgaagcgggcgtgaccacgatcctttgggccactggcttcactttcgatttcagctggttgaaggtggacgcgttcgacgaaaaaggcgaaccgttccacaagcgcgggatctcggcgcaaagcgggatttacttcctgggtttgccgaacctggtcaaccgcgcatcgtcgtttatctatggggtttggcacgatgcgaagtacgtggcggaccatatcgtgttgcagaacgcgtacatggcgtacgacaagtcctaagacgctcagggcaggtcgaccgcaccttgccccgttgcctacagttgcgtcagaatccgccggcttgtgcgcttgggtgggtgtctctaacgtggctcggtcgctgaacactcagtgatcgggtttagtagcccgagtgacaacataaagtgcatgagcctcatcgatcagatgttcttgtctgtgcttgatggtggctgtgcgcagggcgccctcgggcgcgccggctttgtgtgtttccccggtctactaacctgcgtacagctgccaccctctcgtttagtagcgaaaaggtggtggccctaaaacaggtacaacacacatgttcaaagtcacacccaaccctccaaacagtctggacctgaaactgaatcaggcggcgcaccgtgcaattgatcactacctcaacaccggcgccgaaccgccagagccacctccaccgccatcgacaacgctgttcagcatcgccaacgacgccagcaacgagaccttgatcgtcaacagctacgaaaccttttcctcggtgagcgccttgctgctcgacctgtcggaggcgttgacggggaaacagcgggatgtggcgctggccattcaccagttgagtgagttgggggttttgttggtggataagctgatggagcgcgaagctgatcaaggtctttgagaaaccggccatctccggctgataccgccccataagggcgaacactgcaactgtggcgagcgggcttgccccgcgttgggttgcgcagcagccccaataagagcactgcagtgtgccagacagctccgaggctatgttttggggctgcttcgcagcccaacgcggggcaagcccgctcgccacagggtacttatcgccagttttacctaaaggccttgcgtgctttcagccacgcttgggtagcttccaattcggccgaataaagtggcaggtatagccattgggaatccgctccagataatcctgatgctccggctccgcctcccaaaacggccccgccggctcaatctcggtcacaacacggcctggccacaatttcgatgcatccacgtccgccgccgtgtcctcggccacagcgcgctgctgctcgttcaggtaataaatcgccgagcgataactcggccccaggtcattgccctgccggttaggcgtgctcgggtcatggatctggaaaaagaactccagaatctgccggtagctgatcaccgccgggtcgaacacgatttcaatcgcttcggcatggttgccatggttgcggtaggtggcattcggcacgtcgccgccggtgtagccgacgcgggtgtgcagcacgccggggtagcggcgcaacaggtcctgcatgccccagaagcaaccgccggcgaggatggcggtttcggttggtttggtcatggtctgcccttgcgttcagtggatacccgcctagttatggggccgtgttggccaatagcaagattcacggtttgttacgcagtgcgccagcacctcagggtttgaagtttttcatcagtttgaacaggtggccgggccagatccagcgtgactggggcgggtcgcgagtctcatcgagagcgtccagaaaggttttgttgggcacatcaccgtcaggtccattcacgtttggacgcgggagagttggatcgtttggcgggtcctccggcttatagacccgatgggtggctgcatccagcacgtaaccggcggccttgccgtactcagtgaggctccagacaccgtcgatgacttgggagactgcctttgagggtggaagcttgatgtccttgtgcgtggtggtgacgatatggtctgcagttttggcgtgtttgaaggtggcgtactcgctgccgagtggaggttgatccgcgccctcgtcggagaattttttcaccatacgttccaggaacggtatgccgccgatgtgggtgaacgcgcccatgcccgggttcaggatgtgtttcacaaagccagggtcaacacgggtgctgctgagcgctgaactggtgagtatgcgtgaggcgatggcctcgtcctctggcttgtaattgaacgtcgtccaatacccgtctacgtaaaagccattggtggctatgtattggcgaccgtcgctggagcgtcgatactcgccgagtgcccagaccaaaagatcaacgtggcctaaatccgcaccttctgactgtagatatgcatacatatccgcgaccaaggcacgatcatcgaggttgaggaagtcgcttgctctttgaagggcattcactgaagtggccggtggaaggccgacggggggttctctaccgccaaacacgcgcgaaatcatgatctcacggccgacactggcagcctgccccgaactagaaccgcctgaaggctccatcgacttggccgtttgccacgccacccttcgctcattgaccgtgaaggcgccgccgttgtcgcgggcgatcaggttgagttgatctcgcccgagtcccttgaaggggttgctgtcatgaccgttgaggaaaccggtcgcttgtcgcgcacgggccaggagttccgggttattggccgttggaagctctgcgtcgtgttgtgccttgttggcgaaatactgttcgtcggtgatgggttcgagggggttggcgttcttttggcccgtgggcgcctccgcacgctgtgccgcatcactcaattgacgcgccaggattgagacggtcgtggtgccgttattacttgaagcaatgggcgcatcacgttcaccgccatcaagcgagatagcggacggagtagcaccgctgacggaatcgcttgtcacgcgactgttggacgatggcgtataaggactgatagtgaccatttgtcttcacctagcctctattaatccgcctgactcacggacatggaatgcagtgcgccggcacctcagggtttgaagtttttcatcagtttgaacaggtggccgggccagacccagcgcgactggggcgggttgcgggtgtcggcgagggcatccagaaaggtgttgttggaagcatcaccgtcaggcccgttcacgtttgaaaccgggtgagttgaaacgctgcgtggttcctctggcttatagacacgccggttagccgcatccagtacatagccggtggccttgccgtattcggtgaggttccataccccgttgacgacttcgaagagggcctcggaggggggaagttttatgtccttgtgcgtggtggtgacgatatggtccgccgccttggcgtagttgaaggtggcgtactcactgccgagggggggttgatccgcaccttcactggagaattttttcaccatacgctccaggaacggtatgccgccaaagtgggagtacaccccgatgcccggatccaggatgtgcttcacaaaaccctggtcaacacggctgttgccgagcgctgaactggacagtatccgtgaagcgatggcggcgtcctccggcttgaaatcgaacgtcgtccaatactcatcgacgtaatagccattattgctaatgagttggcgaccgtcgctgaaataacgatagtcagcgagtgcataaaccaatcggtcgacgtgacgtagatccgcaccttctgaatgtgcataagcgtacatatccgagatcaaggcacggtcatcgagggtgagaaagtcgttgcgattttgagtgccgttttcaaaggtcgcgggtggaagggcaacgggtggttcgtcattgtgaaacatgcgcgaaatgaagatctcacgaccgttaatggggaccagcgtgggattagaagcgcctgaaggcgccatcgactggacagtttcccacgccacccttcgctcgttaaccgtgaaggcgccgccgttgtcgcgggcgatcaggttgagttgatctcgccctagtcccttgaaggggttgctgtcatgaccgctgaggaaaccggtcgcttgtcgcgcacgggccaggagttctgggtcattggccgttggagtctctgcgtcgtgttgtgccttgttggcgaaatactgttcgtcggtgatgggttctagggagtcggcgttcttttggccaacgggtgtctccgcccgctgtgccgcatcactcagttgacgcgccaggattgagacggtggtggtgccggcattacgtgtagagaggggggcatcagcctgggcgttgtcaggcgagactgttgacggaataacaatgccgccggattcattcgtcacgcgactgttagacgaggaggtattagggctgatagtgatcattagtattcaccttgcgtagggcatgtgaatggtcatgtaaaagtttcttgcctatccaaatacccgcagccaaattcgctgcgggcatcacaccacacactaatagctatatttaattgtcacagcatcaacgccggcaggacgagcgtaaggtggagcgccacccaataccgtatgaaaaatcgtaacttttgaaccatgaccgaagggctggctattaaaatccatcagcacacccgaagaactcggaaagatatcacgacaatctttttcggcactgaaggagcgaaagtaacacagctcaaccttctcactgagtgtcccaggatagtatgttgtactccaccgaacttctgatatctgcttgggatactggagtgttcctgatggaatatccgcagccagcacactaaagtttgcgaattcacgacttggcacagtattagaattagacaaaaccaatacgggagttggcgccaccgttttagtaaaaacgccctccgccgccaacaccacatcctttgtaaaaaccgccaacacaacacacacaacaagccaaactttactaatgcttttcgagctcttcataatcttcaccctagttcataagtgagcacctgaggttccaatcattccagcagtaggaatcacaccactacccttgcacgatttttcaattcaagtaaggcacccgcttcctaaaaacatgaagcccttatctgtaatacttacaagtaggactttgtcagtaacttcctagtcccgtctcccctctattaaaaacccctgctccaaggcatgatgccgccctcacatcaaggacgataaaaccgtgaaaaccaccctcaccgcgctgctgttgattggcttggcgatgcctgcattcgccgataccaagcccatcggcttcaagaacatcaacgtccctgatgcacaacgcccgctgcaaatggtcgtctggtaccccgccgccaccgcagctacgcctgagttgatccgcgatgacgccgtgtttttcggtgccttggcagtgcccgatgcgccggcagcgagcggcgaacatccgttggtggtgctttcccacggctacggcggcaactggggcaaccaggtgtggctggccagcgccctggcccatcaggggtatatcgtggcggcggtcaaccatcccggcaccaccagcaaggatcgcagcccccaggccgctgcgcagttgtggcaacggcccaaagacctgagccgggccatcgatgcggtgatcgcccagccgacgcagttcggcaccgtggcaaacaaccggatcgccgtggtcggccactccatcggtggctggaccgccatggaaatcgccggcgcgcgtttcgacccggacctcttcgcccgcgattgcaatactcatcccaaattgggcggctgcatcggctaccagcagatcaagcccgccgcgaccccggcggcgaaggcccaactggccgcactgccggtgccggcgctggtgattgcggggggcgtgccaacggaagatatggaccccaacctggagtccgccgacatggtcaggcgcatgcccaaagcctcgacccagtacgtggaaatcctcgatgccacgcacttcagcttcatgtcgatctgcaagccgggtggcatggcgttgatcgaagaagactcgccgggcgatggcatgatttgccgcgatggcgagggggctcggccaagggcggtgattcagcaacaggtgctggatctgatcaccggttttttggggcggacagcggcacggcgcacggcggccgatttttagctggtatcatcccgggcctgtacaacccgggtagaaccacatgaaccgccagaaaaaactccagcagctcttcaaggaaaaagccaggaaggccaacgccaagttggcgccgaagaagaaggacaagtacatcagcaaggcagaccgggaaaagctcgcggccgaagccgctctggacccaagcctttccccggaaagctgactcagcaaccgctcaacgcgacctgccgccgctcgcccgcaaagaaaaatggccgcagccgcacgcccacgctgttgccgataaacgccgccaccagccacacccagccatgcaggctgcccgaggcgatgccactgaagtacgcgccgatgttgcagccgtacgccaggcgcgagccgtagccgagcagcaggccaccgatcaccgccgccaccagcgagcgcgccggaatcttcaggctgggggcgaaacgcccggccaggccggcggccagcagcgcaccgaggacgatgccgatgtccatcacgctggtgatgtcttcccacaccggcgcggccagggctttggcgttgcccggcatctgccagaacgcccaactggccacgtccacccccaggccgctggcgactttagcgccccacagcgcgaatgcagaggtgatgccccagggccgtcccgccaacgccagggtggcgtagttgagcagggccaggccgatggcgccccacaccaatggccatggcccacgcaggaagcggcgcacgccttggtgttcgcttttcacgccctcttccaactgaccatgacggcccttctccagccgtacggtcaccagcgcgatgatcgcgaacaccaccaggctcaagcccaatgccggcaccacgccgaagctcttgacgatggacaccgccgggaacgccggcagcgcaaaccaccagtcaacatggtgcgtggcgatcaacgaaccacagataaagaacagcaaggtgaccagcatgcgcgcattaccgccgcccacggtgaacagcgtgcccgatgcacaaccgccgcccagctgcatgccaatgccgaagataaatgccccgaacaccaccgacactccggccggcgccaccagcccggtcaccggctgcccgaacagcgtgcccgcccccaacgccgggaagaacagcagcaccgccagcgccagcatcaccatctgcgcgcgcaagccggcgccacgccgatcattgatgaacacgcgccaggccgaggtgaagccgaaggcggcgtggtagagggtcaagcccagtgcggcgccgaccaccagcaacagcacctggcgcgagccaacgctgttttgcaagaacagggcgcccagcaccaggatgataaaggccaccagcggcgcgacgggcttgcgcgcgggggtaagaggcagtgaggtactcatggggaatctcggtctgtttgaatggagtaggctgcgagggtggcgagtataaccttgtgtgtagataatcctgggaggcgtgtggcctgacggcgcccctttcctccatcagccggtgaccccgtggccaaagacatcgagaacccttgcgtttccctctgccagctcagcggcgacctgtgtgtcagttgcggacgcaccaaggatgacatccgcaagtggaaacgcatgaaacgcccggagaagatggccgccgtacagcgtgcgacacagcgcctcaaggctttgaagaaagccaggtgaggccgttcatgcatctgtggtgagagcgcgtctgtggtgagcgggcttgccccgcgttggagtgcgcagcgctcctttttttttggggccgctacgcagcccaacgcggggcaagcccgctcgccacaaaataagcccgctcaccacagaggcccgctcaccacaattggcccgcaagatcgcggatcaaccccgccccaccgaccccgacaccggaagatcccccagcaacttgagcccggtgctcttcacaaacgtcgcgtagtccatcggtttctggatacgcgtctcggcattgggtagcacataggcccaggcacgtttgctggaggcgtcgtacaccagcttgaacaaccgcgtcggcacccataccttgttatcgccgatggtgccgtagcccgggtcgaacagcgggcctgtgaacacatacacatcgccgccggcgcgcacggcaaacttacgcacgtcggcctcgaccttgctccagatcttgcggttgttggtggggtcctggggcaccatgttcgacagcgcgaacgactgcgccatggcattggcattcggtgcatcggcggccggggattgatgcccacggtccaccgccgggtgctgggcgcggtagtcgctcaactcggcgcgaccggctttggggatacgcggatcggcatagaactggttggtgcgttcctcgcccttggcgtctttcagcaaggcggcattcaggcgttcgaccaccaccagcggggtcttgctggtttgcgagtagagcaccgcaaaatggtcggaacacagtgccaggggtttcatcgcggccggcaccgtggcggggttgatcggtgcggcggggaacaggtcggcacagctgtcgaaggacagttgtttttcctgtttggagtagaggtccggcaggctgcgggcgttggccccacaagacagcaaaacaaaggcggtcagcccaacggcaattttgcgtaggtacatgcattaaatcttcgaaaaggagtgaagcggctggctccggcgtgcggagccaagtggatgatattgcgaggattattgactagcagatgtgagattagtgcccgaccgctgtaggttttcccgcagcccgcgcgcctggtttgaaaccatgggcatgggcgccccaggcaatcgccagcgacacgccgatcaacagcagcatcgcccacggaaacgaagccacgccccaggtctccagcagcaccccaccgaccacgccgctgccggcaatcgcgctgttccaggccaccacattcagtgacagcgccacgtcggcgccatcgcccgccgcatcggccagggcggtttgcagcagggtcgcggcgccaccgaaactcaggccccacaccgctacaccgatatagaccacttccggccggttgccgaaaaggcccagccccagcgcgacgatcgcgaacaccgccaggctgacgagtacggtcttgcgcaataacggctcaacgagcctggccgtgagccagatccccgccaacgcggccaccccgaacaccaacaacaccaggtcaacccgctctgccaaccccgcaggcgccacgaacggtgcgatgtaggtgtacagaatgttgtgcgccagcatccaactgatcaccaccgccagcaccggccgtacgcccggcgtggtcagcacctggcccagtgacacacgttgatgggcgggctggggcgcatagtccgggactttcaccagcacccacgcaatcaacaccagactcactgccgacatcaggccaaacgtggtgcgccatcccaccaacccacccagccaggtgccgagcggtacacccaatgacagcgcaatcggcgtacccaccatcgccaacgccaacgccctgccctgctgatgcggcgcgaccatgcgccgggcgtaaccagccagcaagctccaggccagaccggccgctacgccggcgaagaaacgcgctaccagggtcacgccatagtgggacgacagcgcggtgatggagttgaacagcagaaagccgacgatggtcagcaacaacacattgcgccggcgccagccacgggtcgcgatggtcatggggatcactgccagcaccgagcccaaggcatacgcggtgaccatctgcccggccatcgacggggatatcgccaggccgtcgctgatcagcggcaacaggccggcgggcagggtttcggtaacgatgcagatgaagccggtcatggccagggcgagcaaggcgccgatgggcaggcggtcggatgacgccgataaagtgagtgagggtgtcacggagaactccttgagcgagacttaaatactgatcgatacaaatgttgcggccgagcacggctcgttgtcaacgacttatgtatcgactagtatttatctcgcttccccaccggagatccgccatggcacagatgggccgcccccgcactttcgaccgcgaccacgccgtagaccaggccctgcacttgttctggcagcatggctacgacgccacctccctggcccatctcaaggctggcctgggcggcggtatctccgcgccgagtttttatgccgcgttcggttccaaagaagccttgttcgacgaatgcgtgcagcgttacctggcgacctacgcccaggtcaccgaatgcctgtgggatgaaagcctgtcaccgcgtcaggcggttgaaacggcgctgcgccgatcggcacgcatgcagtgtgaagacgggcaccccaagggctgcatggtggcactgggtgtgatgagtgcaccgagcccggagaatgcgcgggtggcgaatgggttgacgcaatcacggctgcgcacccgcgcgggaattgtggcctgtgtggagcgcgcaatacgtgccgggcaattgccaggcacgattgacccggcggtgatggcgacggtattcgacagtttcctgcaaggcgtttcgatccttgcgcgcgacaacgtgccccacgccagcattgacgcggcgatcagccaactgctgctgacctgggacattgccgcgtctacgacaccgcccattcgtcccgacactgcatcaggaaatccacaaacgcccgcacccgatgcggcatatagcgcccatggggatacagcagggtaaacggtcgtgaacgcccgccaaacggctgcaggacttccaccaggctgccgtcagccagttcctgctcgacgataaacctgtaggtctggaacaaccccgccccatgcctggccagggtcaccccgcccagcacatcatcggagcagctgtaccccgcctcccccgcatactcctgcgccttgccgtccacctggaacagccaggcgatgcgccggccattgctgggcagttcgtactggatgcattcatgggtgggcaggtcttccagcgtctgtgggatgccggcgcgtttcagataggacggtgccgcgaccaccaccaattcggcgtcttccagcaggcgcgcaatcagcgatgagtctggctgggcgcgcacacggaccgccaggtcgtagccttcggcgacgaagtcgatgttgcgattgctgatgtggatatccaccgtcacctgcgggtacaacgcacgaaacctgggcagcagcggcagcagacgatgatgggcgtaggtggtgggaatgctgatgcgcaacaggcccgatggcacggcttgcgcgcccatcacttcctgctgggcttccaccagctgggtcagggcctggcggcattgctcgaagaaagtccggccgctgtcggtgaggcggatgctgcgcgtggtgcgcacaaacagccgcgcgcccaagcgctcttccaggcgggaaatgctgcggctcacggccgccggcgtgacaccggcaacctgcgcggcggcggtgaagctgttggcctcggcggcgaggcagaatagttcgatactgcccagctgcacatcttcgaaatggcgcttcatggtcgctccctaaaacaacagccgcgagaaattgcagcacgcctgtgccagttgcgctacctcttgattcagcccgtattggcggtccacccggtgcaacgccacatactggatatccggcagcgccggctgggtcaccagcgcacgcagggtgccttgctcgatcaggtgggacaggcaggccacgggcaggtagctcacgccgatccccgacaacgccaacccggcctgcaccaacaggttgtggctggtgagggtgcgcggcatctgcacatggttggccgccagccagcgctcgtagatcatcccggtccccgactgtgaaccttgggtgagcacggtgtagctggccagagtctccaggctgatggggtcggcatccgggatcaggtcaggggcgcacatccaggcgttttccacgcattgcagcggcgtactgtgaaaacgcgggtcgctgtagacgtcaggcacgatgaccaaatccaactggtcgctttccagtttgcggaacagctcgctgctgagctccaccgacggttcgatctgcaccttggggtacatctgacgcagcgcttcgaccaacgccggcagccaagtgagtgcggtgagttcggtgacgcccaggcgaaaccggcgcaccagcacatcacgggcactgacccgttccagcaattggtcgcggctgttgagcaggtcacgcgcgtagtccagcagctcgccccccttctccgtcagccgggcgttacgtttgctgcggtcgaaaatctccacgccgaaggtgtcttccaactcctggatacgcttggagatggccgactgcgacatgttcaacttgttggccgctgcttcgaagctgcccagttcggcgatccagtacagcgcatcgatttgcttgaacgtgatcatggcaggctaatcatgagaaaaagcgatgctaacacatcataaaatatcgctaaaactctccgatcatcgctcataagatctggccatagcccgtcgctatccaacgattctggagatttgccatgtccttgcccggttcacgcatccttcccaacgcccccatggcctcggccgaactggtcgaggcgttcgcccaagtggtcaccccgcacatcagcgacaacctgggccggcacatcggcgcacgcggcctgacgcgctacaaccgcagcggcaaactggtgggcacggcgatcacggtgaagacccgtcccggcgacaacctgctgatctacaaggccctgagcctgctgcaacccggccatgtgttggtggtggacggccagggcgataccaacaatgcggtgatcggcgagttggtcaagctctacgcccagcaacgcggctgcgtggggtttgtgatcgacggcgcgatccgtgatgtcgccagcttcgacgacacgccttgctacgcccgcgctgtggtgcacaccgggccctacaagaccggccccggtgaagtgaacgtgcccgtgtccatcggcggtatgctggtcaaccccggtgacctagtggtgggtgatgaagacggcctggtcgcgttctcccaggccgacgccgccgaagtgctgcgccgcgccgcgcaacatgccgaccatgaagaggccgtcaaagcagagatcgccagcggtgccgtgcgccagagctggatcgacaaggtactggacaacgcagggctggcgtcatgaggcactggttgtctgatcgcgtcctgggcatcgcgccctcccccagcatcgccgccaacgcactggtcaccgagttgcgcgcccagggccgcgatatcgtcaacttcaccgtcggcgagccggacttcgacaccccggcgcatatccttgcagcggccagccaggcgatgcacagcggcgacacccactacacgcccaccaccggcaccctcgccctgcgccaggccatctgcctcaagctgcaacgggacaacgacctggcctacggcctggatgaagtggtggccggttgcggcggcaagcacatcatctatcacgcactggccgccacgctgaaccggggtgatgaagtcatcgtgcacacaccctattgggtgtcgtacccggacatcgcacggctcaacgatgcaacaccggtgatcatccccggtgatgaaagcctgggtttcaagctgtcgcccgacgccttggaccaggcgattaccccgcagaccaaatgggtgatcctcaacagcccgaacaaccccagcggcgcggtctacagtgaggccgagctgctggcgctggcccacgtgctgcggcgttatccacacgtgctggtcatggccgacgaaatctatgagcacttcgtctacggtgaagcccggcacgtgccgctgacgcgcctggcgcccgacctcaagtcgcgcacgctgatcgtcaacggggcctcaaaaggctacgccatgaccggctggcgcctggggtttggcgcaggtcccgcctggctgattgcagcgatcgccaagctgctgtcgcaaaccaccacctgccccagctcgttgagccaggcggctgctgtcgccgcgtttgccggagaccaggcacccatcgccgccatgcgcgaggaataccagcaacgccgcacacgcatgttggctttgctcgcggacatccccggtttgagctgtaccccaccagacggcgcgttctacgtgttcgccaatgtgagcgggctgatgggcaaagtcacaccgcaaggcggtcgcctcgacagcgacagccaactggtggactacctgctgcgtgactacggcctggccacagtcagcggtgcggcgtacggcatgtcgccctatgtacgcctgtccttcgcaagctcgctagaagtgatcgaagaaggttgccgacgtctcaaggacgcgtgccacgacctgcgctgacccgccctgctgcacccggcggccaacggacggccgctgttttgactgcctagaacaacaacttaaaaatcattgatcgcaaatgaggcattcccatgcacacgccccgtatcgcgctggtctggcaaatcatgatcggcttgctggccggcatcgccattggtgccctgttgcaccgctttcccgaatcccggccgtggctggtggacaatctcctgcaaccggcgggcgatatttttatcaagctgatgaaaatgatcgtggtgcccatcgtgtttgcctgcatggtggtgggcattgccgggcacggcgacggtaaatccctgggccgtatcggggtacgttccctaggctatttcttttgcatcactaccctggcaatcatcgtcgggctggtgctgggcaatctgctcaagccgggcgccggtacggagttgtcgagcctgcacgcggcaaacatcaccctgcccaccagcaacggcggtgggcatagcctggggcagatcgtcgtcggcatcatcccggataatgtgatcagcgccatggcccagggcagcttgttgtcggtgctgtttttcgcggtgatgttcggcctgggcgtcgcgcgcttgcccgccgagcgcaaggacccggtggtcgcactgctgcgcggcgtgtctgacgcgatgttcaaggtcacgtcgatgatcatggcctactcgcccatcggcgtgttcggcatgatcgccgtgaccgtggccaacttcggttttggttcgctgttgccgttggcgaagctgatcatggtcagttacgtgtccatcgcgttctttgtactggtggtgctcaacctggtggcgcggctgtgcgggatcaatctgtttgccttgatgcggcatatcaaggatgagctgatattggcgttctccaccgcgagttcggcgtcggtcatgccgcaattgatgaagaagctggagacctacggggtgccgccgtcgctggtgagctttgtggtgccggtgggctactcgttcaacctcgacggcgcctcgctgttccttggcatcggcacgctcttcgtggcgcagttgtatggcatcgatttgaacctgggggatcaggcgctgctggtggtgaccatggtgctcacgtccaagggcgccgcaggcgtgccggggttcatgttcgtgattctctcggcaacgctcgccagtgccgggttgccattggaggggattgcgtttattgccggggtgtatcgcttgatggaaatgccgaccaccgcactgaacgtgctgggcaacgcgctggcgccgttggtgattgcgaagtgggagggccgggaggtgccaggggctcaccaaagagcacctacgcggtaagtttcctgatgatgtgtaggacttgcctgattccgccggctcggctggaacctgccgctttttttcgctagattcctccccaacgcatatgggcaaccatgtgcccaccttccgaggcccgttgcgagaaatcgcacgggctttcgtgtttctcatggatggggaaatcgaatttggtgcagtacattgcttatctggatgagtttgggcacgtgggccaatatgtctcgcgaaaacacccgatgtacaagaccagccctgtattcgggttaggcggcatgctgattcccgccgaagaggtgcgcgagttcgcaatctatttctacaagctcaaatgccagttactcgcctgggacctgaaacacaaaaaccctcatcacttgcctgcctatcaatgggaaaagaaaggctctgcactttttactgtgggtaatgtgcgcaaatatccggagctgcgaagatcctcatgtcgtttgctgagtcatatccagaaaactggcggacacgttttctacacgggtgagcacaaatctatcgagcccagggaacacgactcgaccgagaccttcaagcggacgctgttacagtcaatccgcaagattgatcgcttctgtacgttgaacaatgcctcgttcatcgttctgctggatgagcagaaagcaggcaatgaatggcgcgaacgaaacgtagaagcctgtaccctggcgatgtttgaagatccagcagaaaaatgccgcacactgatagagcctccgcttcaaggtgagagctatctgtttcaaacgttgcaatgtgctgactggctgtgcggattgattggtcggctgacgacgtttgctgtcgctcctgaggagttcgaagactggcaacttttcgatatgtattttgcggcacgcatggctgacgtgaccctgccgagcagtggtctggacggtaaaaaaacggccaaagccaaagagcaattcgctcaattaacagcaaatgactgttaatcattgggccaaataaaggcgctcctgagagcgcctttattcagttcaactcactgctcgccgatggatttcacatccgccttggcagcgccaccaatcgcaatgcgttttggcttggcttcctccggtaccaccctgagcaggtcgatgctcagcaggccattggcaagctgcgcgccctgcacttcgatgtggtcgaccaggcggaacgacaagcggaacgcgcgctgggcgatgccctggtgcaggtaggtgatgccctcatcgtgttcgcgcttgccgccggcgacggtcaacacgcctttttccacctggatttccaggtcatcctccaccaggcctgcggccgcaatcacgatccgataatgatcgtcaccgtgcttttcgacgttgtgcggtgggtaggtggtgccggcctcgctgcgaagcgccgattcgaaaaggtcgttgaaacggtcaaagccgacggagtgacggaacagtggggccaacgaaagagtagtagccattgcaaaatctcctgaggtttctccaagtgatttgatacgcgacccgcattcggcatcgcgtaaaacctaagtaggttcgggctgaaaattttcaagcggccccacaaaatttttttatccgatgtgacgagctccggacgaaaggctgacacaccggcgcgccaggaccgtcgtggggtcaaccagggcgacccggtgggcaccgatctcgaacacctcacaatgcgccagcaccaacggtaactcggtacacccgagaatcaacaccttcgccccctgctcacacaaatgctccgccgccagcagcaactgctcgcggcacacgccctcggtaaaccccgccttgatcccccgttcgccgtagatcgcctccatcaccagcgcctggtaatcaaagcccggcgtgatgagttgcaagccgcagcgccgcgcggcctggtggtagacctggctttgcagggtgccggacgtcgccagcaagcccacggcctggccgctgccgtgggtgtgcacgatccactccaccgtctcgctgagcatgttgacgatgggcacgcgcaggtgcgcctggatgcgttcgacaaacgcatgggcggtgttgcacggaatcgcgatggcctgggcgccggcgctttccaggcgtttgcaggtggcgtacagggccagggtcgggtcggtttcatcacgcagcaggttggcggtgcggtcgggaatctgcgggttttgctccaccaccatcttgatatggtcctggtccttgtcggccggggtatgggcgaccaccttgcccatgaaatccacggtggccgccgggccgacgccgccgacgatgcccagtttgaacggcggctgacgcgccgggccatcggcctgggtggcgaactcggcgtagatctggttgatgtcgagggcgctgatgccgcgccgttgcaggtcgccgcagaccagcgacaactcggtcatgcccggcacaatcaccgtggcgccctgcccttgcagcgacaggcacgcctggtacaccgactccagcggcacgccatcgaggtggccatccttgatgccgttgacgccgtacatcgcctccatcaaggcggcctgggcgtggttctccgggtagaccaggatgaagtgctggccgaggtgccgttcaaacaagccgccgtggcgcacgaagtccgatgcgatcacgcccaggatggtgccgggcgcgacgtggcgggtgatgtgccggaccagcgcctgcatcatgtccagcaccggaatgcccagttcctgctggatttcagcgcgaaaggtctggctggcgaaacacggtagcagcaccgcatccaccccggtgttttcaaaggtcttgcacacctggaacacatagaacttgcgcgcggtcatgctcgcgttacggtccaggggcagcaacacatccttgaacggatgctgctcaaacaggaagtgatagcggccctggtcctccagcacggcacgggacttgaccagcttgtagaacagatcgccgcccgccagcgaaccgagcccgccgacgatgcccagccgggaggtggggttcatgcgtgcgcaccctgcggcagttcagcggggtcttccgcgctttcggatttggctaccaccgccgtggcgatgctgttgcccaccacgttggtggcggtgcgcgccatgtcgaggaactggtcgataccgatgattagcaacagacccgcctcgggcagattgaacatcggcaaggtcgccgccaccaccacgaccgacgcccgtgccacccctgccatgcccttgctggtgatcatcagcgtcagcaaaatcagcagttgctgggtgaaactgaggtcgatgttgtaggcctgggcgatgaacatgatggcgaacgcctggtacatcatcgagccgtcgaggttgaaggaatagcccagcggcagcacaaaactggagatccgcttgggcgcgccgaacttctccagcgcctccatggttttggggtaggccgactcgctgctggccgtggaaaacgccagcaggatcggctcgcggatcagcttgccgagggtgaacaccgagcggccgagaaacagatagccggcggcgaacaacaacacccagagcaaggcgatccccaggtagaactcggcaatcagcttggcataatcggccagcaggcccaggccattggtggtgatcgccgaagcaatcgcggcgaatactccgagcggcgcgaaggccatcacgtagtcggtgatcttgaacatcaccttggccaactcgtccacggtgtcggtgatgcgcgtgtaaccggcacgcctgaccccggcgagggcgaagccgaagaacagcgaaaacaccacgatctgcaggatctcgttgttggccattgcctcggcaatgctgcgcgggaatacatggctgatgaaggtcttgaggctgaagtcgccggtgttgaccggcaccgctgccgtcgcatgttgcaccacctgcatgttcagcccggcgcccggttggaacaggttgaccaaggccatgccaagcatcagcgagaccagcgacgccgtgacgaaccacagcatcgcacgcaagccgatgcgccctaccgagcgcgaactgcccatgctcgcgatgccgcccaccagggtggcgaacaccagcggcgcaatgatcatcttgatcatgcgcaggaaaatatcggtgaccagcgaaaagtatccggccagctccttggcggcctgctcgctccctgcatagtggtgacacgcccaacccaccagcacgcccaaggcgatgccgactgcaattcgacgggggagtttgttcttcttcacaggtgcggccctcagatggcttttgttgtatggagcggattctagggacgcaccccggcggccatgatgagtaatccggctaaccccatgcgcttttggaatagtttgcaaaaagcccagccccggctacgcgcggcgacatacactcagggctcatcgcctggagaaccggcatgcagatcaaatggttggacgacctcttggccatcgccgagtggaagaacttctcccgcgccgccgaagtgcgttgcgtgacgcaatcggcgttgtcgcggcgtattcgctcactggaggaatgggtgggcgtcgaactggtcgaccgtggcacctacccggtgcaactgaccgccgcaggcgccgccttctgcagcgaaagccgcgacgccctcgccggcctgatgcgcctgcgcgccagcctgcgcgaagtggaacgcatgccggggcgctcgatccaggtgaccgccgcgcacagcctgtcgatgaccttcctgcccaagtggctgacgcagttccagcgccagaccgagcagttcaatgcacgggtggtggcggcgaatattcatgacgcagtgattgcgctggaagaaggcagttgcgacctgatgatcgtctaccaccatcccctggcgccgatcctgctggacgcgcaacgcttcggcagcctggccttggggcatgatgcgtttatcccgttgtgcgcaccagacaaacgcggccgaccgctgtatcgcctgccggggagcacggggaagcctgtgccgcatctggcttacaccgccaccacgttcctgggccgcgtcgcagaaatcgtgatcaagaacggccctgcgcccgccgtgctggagcgctgctacgaagccgacatggccatgcttttgatgcgcatggccattgaagggtatggggtggcgtggttgccgcagagcgcggtggtggatgagttggagcgtgggctgctggtgcgtgcgggtggcgaggaatggagtacgcggttggagattcgctcgtactgcgcgattgaaaaccagaacccgacgatgaggaagttgtggcgcacgctcgaagggttgcgctgacgttaatgcacctgcggcatcgcccttcgcaaacgctgggccagtaaatcggagaacgcttgcgccagggccgtacgggggacatcactgcgaaaaaccaggccgaatgagtacggcaaaaccggtagaaaaggccgcgtcacgatcggcaagtccaagaaatcattggccagcaattcattgatgatcgacacgccgatgccctcggcgacgaacgcgcaggcggcacctgccgaatgcacttccatacgcacgttgggaagaatggacgcctgccgaaacacctggtcaagctccgtgcgcaggttgcgctggcggcccagcagcaccaacggcacaccgcgcaaatcactcacctggataacgcgccttgcgcacagcgcgtgcgcttggggaagcacgcacacgccttgcacctgcaacaccggcaccacgtcgaagcccggcaattcggtgggcagacgcacaaaggcaaaatcgacgctgcggtccagcaccgcacgctcaagcgcatcgtaggagccagtgaccagttcgatcacaaggtcatcgcggccctgcatgaattcggccaccacacggggcaaccattggtgggtcatgctggtgggcaccgccacgcgcagcagcgcccggcctgcgtgacccaggcgcagatcgtcggccatgcgctggacgcgttgcatgttgtcgaccagccccgacacctccggcaaaaacgcctcggcctcggaggtcggcgtcagcctgcccttcctgcgcaggaacaaggcaaagcccagtgactcctcgagctggctgagcaaacggctgatggccgactgggacaagcccatgcgcgtggcggcatcgatggtcgaaccggtcgacatgatggcctggaaagcttgcagttgtttgagattcacgctcgggctccaagcagacacgactgggcgcagtttccgctggcgacacctgcggcgtccagccttacagccctaccagagcttgatgtcgtaggtcaggtacaggcggttgtagtcccaactggtgagcacattggagcggtacgccgtgttgcgaaattctgcccccaagcctttgaacgtgccgtcctggatcacgtacttgaggctggtatccagctcgtgctcatcggccggtttgccggaatacttggcgtcgaaacctttgtagtagcggaccatgaaactcaagcccgggatcgccagggcggaaaagtcatagtcgtagcgcagcatccaggttttctcatcctccaggatgaatttgctcacccccggactggtaaaggacgtggtggccgcaccattcaaatacggcaatgcggcgtcaccggacaactgctgatagccaccgccgaacgtgtgcccgccgagtcgataactcaaggagccgctgaacatgtcggcgtccgcagcaccgttataggccgcccccgtttcaagactgttgtaataacgtacgtccgtcgtcaagtgacccggcccgacagctactttatgcacaaccccgaaaaagtgctggcgatagaagttttcaagttcaccgtagtaataagacagactgatggttttattcagtgcatacgtaccacccgcaaaataaaaatcaccgtgcttcgggcctttgtaaccgctcggtatcagatcgacgttatcgctggagttacgcaactttgattgatccagtcgcccaccttgcacaaatagatgttcgataccggtgtattcaaactgcgtgccttggaacgtctgtggcagcaaacgcccatcgttgtaactgaccaccgggttcttgggcaacaacgtgcccgtcttcaccacgacatcggcgaaacgcagcttgccggtcacgccgaggctggaaaaatcacgcgcggcgcggccatcatcctgcactggcaacaggcctgtaccggcgtgtgcagggctggagtcaagcctcagccccagcaggcccagggtgtcgaggccaaacccgacggtcccgggggtgaatccggaacgcatcgtcagcaacaacccctgtgcccattcgacacggtcgttgccgccgctgcggttgtcatgattgaaagcgtaattacgcaacgcaaggtggccggtggaatcctcgaggaaaccttcggcgcgcacgcttgatataccaggcaccattaagctggcgcacaaaagcccgccggtcgttataaacgcacgcatattaaagccctcagctgtgtttttttttgtggcagagagtaagaaaagttgcttgaccaagtatttcctggccgatgctcctgagtgttaatgaccgaaacgagtaaacaacgctatcgaattaaaacaggggcgacaagcttatgacaaacgcgcatcaggctatgacaaataacccgacgacaccttgaaacgcatagcccaatacgcgttcgtcataacattgtgaggtatttatgattgccctactgtgccgttgtagccgttggctatccccataaaaaaaagatgagagcaccgctatgtcatccactgcgccaacagtcaccgacaccgcgccacccaaaaacacccgccaactcaacccggcaatcatcttgctgagcattgtgttcctggccatggtgctgacttatgtggtgcgctccggccagtttgaacgccaagacgtccgtgtgattcccgggacctatcaggtactggaaaaagacacctcgctcagccaactcttcgccctgccgccgcgctcggcgaataaaaccgtggcacaaccggtatcgctggccgagacctttctggccattcccctggccatcgagaaacgcgccgggctgattttcatggtgctgttcatcggtggcatgtttgccgtgctgaacaagaccggcaccatcgatgccggcctggaccggctgctcggcgccaccaaaggcaatgtctacatcctggtgccaaccctgatgctcgcattgtcggcaggcagcaccttcatggggctggcgaaggaatacatcatgttcgtgccggtgatggtggccatggcaaaccgcctgggcctgcccaacatcgttggcttggcgatcgtcgcgctggcggtcaagacggggtacatgggctcgatttccaaccccatcgcgctgtctgtcgcacaacccctggtcgggctgccggtgttcagcgggctgagcatgcgcatcgtcgcgtacttcatttttgtcacgctggccgtcggctacatcctgttctacatccgccggagcggcttcgatacctcggccacgttttcccattcgggcaaaaaactctccgcgcggcataccctgagcctgatcacactgggggtgggcgtcggcttcctggtgtacgcctccaacacctggcactggaagtaccccgagctgtcctcgtattacctggcgctgaccatcgtcttcgccgccatcgcaggcatgagcccgagcaccacggcaagcacctttgtcgaaggcatgaacaagatgctcatggccggcgtgctgattgcactggccacggccgtggagtcgatcctcgccagcggccaggtgctggacaccatcgtgcacgggctgtcgcagatcatcggccagcacggccaactgcctgcggcgttcggtatgttcttcgcgcagatgagcctggatgtggtgattccgtccaccagcgggcaggctgcggtgacgatgccgatcttcggtccactgggccaactggccggcgtgagcccgcagaccacggtgtatgccttcttgctgggcaacggcttgaccaacatgatcacgcccacttccagcggcctgctggtactgcttgctgctgccaatgtgggctgggtgcagtgggcgcggtttgtgctgccgctgttcctgatctgcacggcggtggcgttgctcctgctcgcctgcgccgccctcaccggctattgaattcgactgaccaaggctttgtcatgaccctccctgcattcgaaaacatgcacatcgtacgcaaccagatgatcaccctgcgcgatggcgtgcgcctggccactgacatttatctaccgctgggcaccggcccctggccggttgtcatcgagcgcacgccctacgacaaatccggcccctcgcgctcggaaaaacgcctggacgggctgcaccttacccgcgagcagatggccgcagcctttaccgagcagggctttgtggcgatcttccaggattgtcgcgggcgttaccgttctgaaggtgtgttcaccaaatacatcaatgaaggcgaagacggctacgacaccttgcgctggatcgtcgaacagccctggtgcaacggccatatcggcagcatgggcttgtcctatgcagcgcacacgcagatggcgatggcctgctgcaatgcgccgggtctcaagaccatggtgctggactcgggggggttcgccaacgcctaccagtgcggcattcgccagggcggcgccttcgaactcaagcaagcgacctgggcctacaagcaagcccaacaaagcgccgccgtgcaggccgacccgcagttgcgagaggcgttggcccaggaagacattctcgattggtttgcacgcatgccgtggcgcccagggcattcgccattgcgccatgtaccggagtatgaaaactacctgttcgagcagtggtcccacggggacttcgatcagtactggaagcaactgggtatctacgccgaaggtttctacgagcagatcccggacatcccggtgttgttcatgtccagttggtacgacgcctatgtcagttgcacgctggacaacttcacggcgttcaccgcacgcaagcagtcacctcaacgcctgatcatgggcccgtggctgcacggtgaccgcaacatcagctacagcggcaacgccgaatttggcaacgccgcgcctttcgacggcaacctgggcgaagactggttgagttgccgagtggaatggatgcaacgctggctcaaaccaaccgaagccgaacggcgcgccactcatcaggtcgatgtgttcctgatgggcggcggcagcggccgaaaaaatgcgcagggtcggctggagcatggcgggcgctggctcaagtcgccgtgttggccactcgcgggcagccaacagctgaacctttacctgacagcacaaagagccctttcgccgcttgctcctgtgggggtgcccagttcattgagttacttcagcgatcccgcccacccggtaccgaccattggcggctcgttgacatcgggcgctccggtgtttgtgggcggcgctttcaaccaggtcgaaagcccggactttttcggcactcggggtgaccactcggcactgtgcgaccgagatgacgtagtgagcttcgaaacccaaccgcttgagcacgactgggtggttgccggcccggtgaaagtcgaactgtgggtgcacagcagcgcgctggataccgatttcaccgccaagttggtggacgtctatccgccgagcgacgattacccacaggggtacgccatgaacatcaccgacgggattttccggtgtcgctaccgggactcgtgggaacacccggctccgctcacgccgggagagccgttcaaggtggtgatcgaacccttcgccacctgcaacctgttcaagcgtggccaccgcctgcgcctggatatcgccagcagcaactttccgcgcttcgatgtaaaccccaacagtggcgaggccgaaggcatgggcgagcatccgcaggtggcgcgcaataccgtgcatatcggcgccgggcatccgagccgtttgatactcacggtcgtggacaacgcgctctcggaggcggaccaaaactgatgcgcgaggcgatttactgccgaaatcgcattgacatatcggtaaatctcgatatcctcgcgccatggacctactcgacatattcaaagccctctcgaaccgtactcgactcgacatcctgaaaggtttgaaggaccccgaaaagaacttccccccgcaggatgaaggggacgttcataccgtgggcgtctgcgtgagcagtatccaggaaggcgtcgggctgtcgcagtcgaccgtgtcggactacctggcaacgctgcatcgagcgggcttgatcgaaacccgccgcatcgggcagtggacctattacaagcgaaacgaagcaaccatcagcgcccttgccgagatcatcggcaaggagctgtaattttttgccccagaatatcgagaattcccgatatccctttttaccgaaacctacggctattgaaacctaccgctattgaaacccacgactactgaaacgaggtaatgcaatgaaagcgatgatgcttaaatcatttggcggcccggattcgttcgaacgctgcgaggtgcccaagccggtaccgcacacgggacaggtgctggtgcgggttcacgcaacctccatcaacccgctggattaccaggtgcgacgtggtgactatgccgagctggtgcccctccccgccatcaccggtcatgacgtgtccggcgtcgtcgaggccgtaggcccgggcgtgacgaacttcgcgccaggcgacgaagtctggtacaccccgcagatattcgacggccccggtagttatgccgaataccacgtggcggccgaaagcatcatcggtaagaaaccacctacgctcagtcacctcgaggcggcaagcctgagcctggtgggcggtaccgcatgggaagcgctgaccgtgcgtgcagcacttcgggtgggggaaaacatcctgatacatggcggcgcgggcggcgtcgggcatgtggcaatccaactggccaaagccatcggcgccaaggtgttcaccaccgtgcgtgaagccaatatcgagttcgcacagcgcatgggcgccgatgcgatcatcgactacgaaaaggaagattacgttgacgcgatcctgcgggaaacgggcgggcgcggcgtcgatgtggtgttcgataccatcggcggccacacgctttcacgcagccccgacgcactcgcgcaactgggccgcgtggtctcgatcgtggacatagcgcaaccgcagaacctggtacaggcctggggcaagaacgcgagctatcactttgtgttcacacggcagaatcgcggcaagctggatgagttgagtacgttggttgcgcagggccaactgcggccgcatgtaggggcggtttatgcgctggccgacatcggacttgcccatgctcggttggagggtgctcacaacggaattcaaggaaaaatcgcgattgccgtcgtgcccgctcaggaaacaagaccatgatttacgagatcgccgtgctgccggttcacaaggaacacatcgacgcgttcaggcgtgcctttgccgaggtggcgccgttgctgagtcgtgccaaaggccacttgggtcatatgcttgcgcagggggttgaaacaccggagcgattcaacctgattgtgcgttggaaatcgctggaagaccatacgccggggtttgaagcgagtgaagaccatcgggtgttcatgttgggactggaaaaatacttttcggaggaaccgcaggtttatcacattgagggggcggtttttagcgcctagagaaatccaaggcaaaaaaaagcctgcatcgctgcaggcttctctttatgtcgctatctggctccacgacctggactcgaaccagggacccaatgattaacagtcatttgctctaccaactgagctatcgcggaatgcgccgtatgttactgattgaaaaggagaagtcaagctttctctggcattcggcgtgattaaaccggatggccggttgaaaccctgtgctccctggccagttccagccaggccagggcggcgggtggcaggtgggcgctggcgcgccaggccagggcgatgtgccagtcggtgtggggttcgtccagggggatcagggcgatgccggggtgttggtgtttgtgcgccagcatgcgcggtacgaaggctacgcccaggccggcggcgaccaggtcgatgatgaagtcgatctgcccgctgcgagcggtcaccttcgggttgacgcctttgcgctcgcaggcagcgaggatcttggcgttgagggcaaagccggcttcgaacaggatgaacggcgaatcggccaggtcggtaaagtcgatacgttcaaggtcggccagcggatggctgatgggcagcacggccatcaacggttcgttgcgcaccggctggtagtcgaagtcttcgtccaccggcagcagcagcgctgccaggtcgacctcccccgcttccaggcactcgcgcagttttttgctgccgtattcggtgagttcgatgtcgatgtccgggtagcggctgcggtaggtggcgaacatggtcgcgaacagcacgccgcaacccaccggcggcaggccgatacgcagtacgccgcgcttgaggccacacaggtcgttgatctcggccaccaggtcattgcgctcggcgagcagcaccagggcgcgacggtaggcgatttcgccggcggcggtgagctcattgcggtggccgaggcgattgagcagcggcgtacccagttcgtcttccagggtcttgaccgccttgctcacgctggattgggtcagggacaccacctcggcagcctgggaaaaaccaccctggcgcaccacttcgacaaaggcacgcaatgttctcaggttcatcagtattcctttggcgactggctgccagcgataaaagttgtttttatcatgccagagaattgcctatcctgacgccaccttgcccgtggagcctctaataatgatcatctcgtccgcctccgactaccgcgcagccgccaagcgcaagctgccgcgtttcctgttcgactacatcgacggcggcgcctacgccgaacacacgatgcgcgcgaacagttcggacctggccgagatcagcctgcgccagcgcatcctgcgcaatgtcgacaacctgagcctgaagaccagcgtgttcggccaggaactggacatgccagtcatcctcagcccggtcggcctgaccggcatgtacgcgcggcgcggtgaagtgcaggcggccaaggcggcggcgaacaagggcatcccgttctgcctgtcgacggtgtcggtgtgcccgatcgaagaagtggcgtcgcaaagcgcgcaggcgatctggttccagttgtatgtgctcaaggaccgcggcttcatgcgcaacgcgctggagcgcgcgcaagcagccggtgtgacgacgctggtgtttaccgtggacatgcccacgcctggcgcacggtatcgcgatgcccactcgggcatgtccggcccgttcgccgcacagcgacgcatgctgcaagccgtcaccaagccgcaatgggccttcgatgtggggttgatgggccgtccccatgacctgggcaatatctccaggtacctgggcaaacccacccacctggaagactacatcggctggctggcgaacaatttcgatgcatccatcagttggaaagacctggagtggatccgcgaattctggaaaggcccgatgatcatcaaaggcatcctcgacccccaggacgccaaggacgcggtgagtttcggcgctgatggcatcgtggtctccaaccacggcggtcgccaactggatggcgtgctgtccactgccaaggccctgccgccaattgccgatgcggtgggcgatgagctcaccgtattggtcgactccggcatccgctccgggctggacgtggtgcgcatgctcgccctgggcgccaaggcctgcctgctcggccgcgccaccgcctacgcgctggccgccgatggccagcacggcgtggaaaacctgctggacatcttcgccaaggaaatgcgcgtagccatgaccctcaccggcgtcacgtccatcgcgcagatcgaccgctcgaccctggtctaaccctgctgttcgacaatcccgcgcgccttgagttgggccagttgctccggtgacaagcccaagcgctggccgaggatgtcgtcggtatgctgccccagcctcggcgccggccggtgatactccacgggggtgccggacagtttgatcgggctgccgaccatggcgaaatccgggttctgcggatgggggatcttcaccatcaggttgcgcgcgatcacctggggttcttccagggattgcgcgatggagttgatcgcccccaccggcaccttcgaggcatggatacatgccacccactcatcggcactgcgccccagaaagtgcgccgagagcagcgcgacaatctcttcgcgatgggccactcggtcagcgttacgacggaagcgcgggtcgtccggcagatgcgccaggccgatgctctggcacagcgcgacaaactggctgtcgttgccgcaggcgatgatgaagtcacggtcggcggcacggaacacctggtaaggcacgatattggcgtgggcattgccatagcgctgcggcaccttgcccgaggccaggtagttcatgctttggttggccaaggtcgcgacctgcacatccagcaacgccatatcaatgtattggcccacgccggtgcgctcacggctgagcaatgcggcctggatcgccacggtggaatacaggccggtcatcaggtcggagaacgccacgccgactttttgcgggccgccgccgggcaggtcatcgcgctcgccggtgatgctcatcaggccgccgatgccctggatgatgaagtcgtaacccggctcctcggcactcgggccggtctggccgaaaccggtgatggagcaatacaccaggcgcgggttgagctcggccagggtcgcgtagtccaggccgtagcgggccagggagccggctttatagttctcgatcaacacatcggaactcgccgccaatgcgcgtaccaactcctggccttcgggagtggcgatgtcgatggccacggacagtttgccgcggttggtcgactgataatacgaagcctcgccagacgactcgccggtgtcggttttcatccacggcgggccccagccacgggtgtcgtcgccgcttttcgggcgttcgatcttgatcacttccgcgccgaggtcagccaacacttgcccacaccaggggccggccaacacacggctcagatccagcacccgcaaacctgtcaatgcacccattgttcttatcctgtgaggttgggaaatcagccgaggctcggctcttcatggcgcagggaaacccccagcagtgcccgccgccgcagccacgggctggggcgatagcgcgggtcgttggtgagttcgctcatgcgctgcaaaatcgtgagcaggcgccgtggcccgagggcatcgccccaggccagcgggccgtgggggtagcccaggccgagctgcacggcctggtcgatatcctcgacgctggcgatgcgctgctgggcaatgtcgcaggcgaggttgaccaccatcgccaaggtgcgctgggccacaaagccgacgctgtcgccgatcaccgtgacgcccacgccatccgctgcgagcaaggcgtgagcggcatcgcgcatcgccggggccgtcagcgggttttgcatcagcgtgcggtggcgtgacaggtccgtcagcacatcgatgcacagcgtgcgcgccgggtcggtatcgaagcgcacgcaggcgctgctggcatcgcggccgtaaggcgccaataggcacaacgcctgcggcgacggttgcgcagcgtgttccagatgggcgcccaggtcgatcaccagggcactcaagcgctcgtagtcttggctgttttccgtggcgatccacaccgggggcagcgcttgcaccgtgggcaccgcctgggggtgcggggcgttgatgagttggccgttttcatactgatagaagccgtggccggtcttgcgtcccaggcgaccgcctaccagcatctgccgggtcaggggcgacggtttgtagcgtggctcctgatagaactggttgtagatcgactccatcaccgggtgcgacacgtccagcccggtgaggtccagcagctccagcggccccatgcgaaaccccgcgccgtcgcgcaggatgcggtcgatatcgccgcgctcggcgatgccttcctccagcatcttcagggcttcggtgccgtaggcccggcccgcgtggttgacgataaaaccgggagtgtccttggcgcgcacgccgcgatggccggtgcgcgccaccagcgccagcaaggcttcaccgaccttgggcgcggtggccaggccatcgatcacctccaccacgcgcatcaacggcaccgggttgaagaagtgcaggccggccacgcgctcggggtgccggcaaccggtggcgatggccgtgacggagagtgacgaggtgttggtcgccaggatgcaacgcgggctgacaatgccttcaagctgttgcaacaggccgcgcttggcgtcgaggttttccacgatggcttccaccaccaggtcgcaatcgcgcaggtcgtcgatgcgctcgaccacctgcaagttggccaacgccgcgtccatcgtcgcctgactgatcttgcccttgcccaccagtttggcaaacgtggtaccgagggtgtcacgggccgtttgcgctgcgccgtcgcgagaatcgaacaggcgcaccaccacaccggcctgggcggcgatttgcgcaatgcccgcccccatcacaccggtgcccaccaggcccagcgtattgataatgtcggtcatgcttattccccccggtattgcggcgtgcgcttttcgaagaacgccgcagcgccctccttctggtccttggagtcgaacaacaattggaacgccttgcgctccagcaccagggcgctttccagcggcaggtcggcaccggccagcatcacctccttgatctgctccaccgccaacggcggcagcgcggcgatctgcgcggccagttccagggcgcggggcagtgtctggtcgtcgctgaccatctcgctgagcatgcccatggccaaggcttccttcgcgctgaccatgcagccggtgagcgcaatgcgcatcgcctggaatttacccaccgcacgcaccagccgctgggtaccgcccgcgcccggcatcaaacccaacttgacctccggctgggcaaaccgcgccgactcgcccgccacaatcaggtcgcaatgcatcgccaactcacagccgccgcccaaggcaaaaccgttgacggccgcaatcaccggcttggggcagcggctgatggcttcccacaagtattcggtgtggcggcggtacatatcgatcgcgccggcagcggcgaactccttgatatccgcacctgcgacgaagaactgttcgcccccggtcagcacaatggcgcgcacatcctggcggcgagccagtgcacggaaatgctcggcgagcgcttcacgtacctgggcattcagggcgttcttgacgtcgggacgatggatacgcaccacggccacgccattgtcctggacgtcgagggtcaccacgggtgggttagcgttggtcacattcactcctgctgcactgttcttgttagttggattacgctagtttcgctgtgcgaaataacattccgcatttgtcgataatcataagtatcgaccccgcaggtgtaaacgtaaaaacccgatctcattctaaaacagtgactaactcgctgttttactaggctttatcgcattaaaaaatcacaacccaaaaagttgcttagtttcgctgtgcggaatactattttgttttgttgattttataaaaaaatgaggcttaacatgcgccgtcgaaacccggactcggacaacaacgaagtcccagcaggcaacaacgctttcgagcatttgttgattgacccgatgcacaacgaggaggaggaagacaaggaccgccagttcgtcaccgccctggcccgcggcctggaactgctgcgctgtttcacgccgagcgagagtgtgctgggcaaccaggaactggcgcgcaagaccgggttgccgaaaccgacgatcacccgcatgacccacaccctgacccgcctgggttacctcaggcacttgccccagtcgggccggtaccagttggacgtgggcgtgatggccttcggttacgccatgttgtcgaacctgtcgatccgcgccgtggcccacccgttgatggagaccatggccaagtacgcccaggcggccgtcgcgatggccacccgcgaccgcctcgacgcagtgtacctggacgtggtccagggtgaagccaacatgaccatgcgccgccaggtcggcacacggttgccgttgcacttgagttcagcaggccgcgcctgcctggcagcgatgccggaaaacgagcgggagttcattctcgaccacatccgccagcgtcatctggaggactggccgaacatccgcaaggggctggaacgcgccttccgggactacaccgatttcggctattgcatgtcgatcggtgagtggcaccgcgatgtcaatgccatcgccgtaccgctgcgacacgcacaacacggcttgctggcgttcaactgtggcggaccgagtttccacctctcccgggagaaactcgaagacgacatcggcccccgcctcaagcacatggtgaacaatatcgaggccgccacccgttagctggaccggtgcatggcctcggcagattgacgataacaggcccgccgaacgggccgctgagggcggcacatgatccgagacgcacaaaccctgcatatcctggtggacgccattgcgcagttcgtcgatgacgcgctgatcccacgggaaaacgaagtcgccgagaccgatgaaatcccggccgacatcatcagccaattccaggacatgggcctgttcggcctgaccatccccgaagcctacggcggccttggcctgaccatggaagaagaggtgaccatcgcctttgaactggggcgcacctccccggccttccgttcgtacttcggcaccaacaatggcatcggctccatcggcatcctgctcgacggcaccgaggcgcagaaggagcactacctgccgttgctggccagcggcgcactgcttagttcgttctgcctcaccgaacccgactccggctccgacgctgcctcgctgaaaaccaccgccgtgcgcgatggcgaccactacgtgatcaacggcaccaagcgctttatcaccaacgcaccccacgccggaattttcacggtgatggcgcgcaccgacccggcgattcgcggctcgggcggtatcagcgcgtttatcatcgaacgtgacacaccaggcctgtccctgggcaagcgcgatcacaagatgggccagcaaggcgcgcacaccagcgacgtgatcttcgacaacgtgcgtgtgccggccagccagttgatcggtggcgtggaaggcgtgggtttcaagaccgccatgaaggtcctcgacaaaggccgcctgcacatcgccgctgtcagcgtcggcgccgccgagcgcatgctgggcgacgcgctgaactacgcgatcgaacgcaagcaattcggccagccgattgccgagttccaactgatccaggccatgctcgccgacagcaaggccgaaatctatgcggcgcgctgcatggtgctcgacgccgcgcgcaagcgtgacgaaggccaggacattggcaccgaagcctcctgctcgaagatgttcgccaccgagatgtgcggccgcgtggctgaccgctgcgtgcagatccatggcggcgccggctatatcagcgagtacgccattgaacgtttctaccgggatgtgcgcctgttccgcctctacgaaggcactacgcagatccagcaactggtgattgcccgcaacatgattcgcgcggcgcaacgctaagcaccacccatacccaatgccctaacaactacaacaaggtatcgctatggaagtcgccgcatcggcgggcgcgttgtcgcctgcaaaaagcaaactgtggatcattgtctttatcttctgcttcctcggcctgttgatcgatggcgcagacctgatgctgctgtcctacagcctcagcagcctgaaggccgagttcggcctgaccagcgtcgaggccggcagcctgggcagtttcaccctggccggcatggccatcggtggcatctacgggggctgggcctgtgaccgcttcggccgggtcaaaaccgtggtgtggagcatcgtgctgttctccgtgggcacggcgatcctgggcatgacccacagctattggcagttcgcgagcacgcggttcttcgcctccctcggcctgggcgcgctgtacgtggcgtgcaacacgttgatggccgaatacgtgccgacccgctatcgcaccaccgtgctcggcacccttcaggccggctggtcggtgggttacatcgtcgccacgctgctggccggttggatcctgcctgaacacggctggcgctggttgttctacgtggcgatcatcccggtgatcctcgccgtgttgatgcaacgcctggtgcccgagcctcaagcctggctgaccgcacgggccgagcgcgcgcaggagaaagccaatggcacccggcacgccctgcagagcaagcccgacggcatgttcaagctgatcttcagcgaccccaaagccagccgcatgttcctgctctgggccctgaccgcaggcttcctgcagttcggctactacggcgtgaacaactggatgccgtcctacctggaaagcgaactggggatgaatttcaagtcgatgaccagctacatggtcggcacctacgcagcgatgatcttcggcaagatcctcgccggtctcgccgcagaccgcctgggacgacgtaccgtattcgccgtcggcgccctgggcacggcggtcttcctaccggtgatcgtgctgttccagagcccggagaacatcctgtggatgctggtggtgttcggcttcctgtacgggattccctatggtgtgaacgccacctacatgaccgaaagcttcgaagcgaagtttcgcggctcagcggtgggtggggcctacaacatcggccgtattggtgcggcagtggcaccggcagcgatcggtttcctggcgtcccatggctccatcggcatggggttcctggtaatgggcggcgcgtacttcatctgcggcgtcattcctgcgttgtttatccgcgataaacagttcgatccgcaaaaacagtaagcgcggcgtccgtttgccaaataactggcgtcattcttcggcgactgtttttagcgataaaaacagtcgcttgatttgtaaggctttttatttaattgaacgaatgtggcatgaatctcgctctaaccctgttcaagcaggttaagcgatgacaagacgtgcggcagtgcccaggggttataacccatggtaaagcggtctaaactgtaactcatgttttacggaactgaaggaacagtaagacgcttggcattcgccactctcatcgagcctgtaagacagttgagtgcttagaggcgaaacggttatgaaaacacctacccagacccatgcaattgactttgacagtgccaaattgcaacgcctgggctttggccaacccgccctcctgccgcgccgccccaccaccgttatcgaacttcgccagcaactgggccagcaactgcaaaccagcctggaaccggagcgcattctcgcggtgttcttccgtgagatccaacgcctggtgcccttggacgccctgcactaccgtcaccaagccagcgacctgcgcctggagttcggccatcgcggtcatcactcgatgagctacagcctgagccatgaaggcgagcacctgggcgagctgatctttcggcgcaaccagcgcctgcaggaagaagaactcggccagcttgagtccctgttggcgaccctgctctacccgatgcgcaacgccctgctctaccgcgccgccacccgcagcgcgctgcgtgacccactgaccgagaccggcaaccgcatcgccatggaccagaccctgcaacgggaaatcgacatggcgcgccgccacctcaatccactgtccttgctgatgctggatattgaccacttcaagagcatcaacgacacccacggccacgccgccggcgataacgtgctgcgcactgtggcgacatcgatcaagagccagttgcgtaacgtagacatggtgtttcgttatggcggggaagagtttctgatcctgctgtccaacaccggtcgcgatgcggcggcgatggtcggcgaacgcctgcgccaggcagcacaggcccaggattactgggcggacggaacacggatcgaattgacggtgagcctgggttgctcgaccttgctggcggccgaatctgccgaaagcctgctgcgccgggccgatagtgcgttgtacgtggccaagcgcgaaggccgcaaccgcctggcgatggcggggtaacccccgccatctgctctgcatcaggcctcgctggcaacccgcgcctgacgctcacgcatcaccgcaggggctttttctttctccagacgcatgcagctttccaggaacaaatacatgtagtcatagcttttgcacacagcctggcgcagttctgcctgcaatgccttggtcgggttcatcccggccagggtgcagatgatctccagcgcttcccacgggtgggcgtcatcgtactgggcatgcatcttcaaccacttcatcgcacgcttgcgctcttcctcggggaaggccgccgcgtagacaccggtggaacacaccacggcggaccactcaccggtcgcgccttcgatcgcgtagttggtcgcggcaatggccacgatcagcgaatcggcagaactggtgtgccagcaccaatggctgagggcgtgcaactccggcggcacgtcctgggcctgtaactcgtccaggctcacgccgtgggcacgggcccaattgacccaataatcggcgtggttgagttccacacgaatattgcgcatcagccagcggcgcgccatgtcctccccaggatggcgggcaaatttggtcttggtcaggttctgtgccatgtacaaggcaaactgttccaccaccggccagccaccgatcaggtagtggcgcagggtcttggcgctgagcgtgttgtcgcgcatgcgctggtacagttcgtgttcgacaactcggcgcttgctctcgctacagtccaggatcagtttctgagcccaggcggggtaactcgaggcttccataagcgggccggttctgttgaatgtgtcgatcactgtaaggctcctttttaagtgtgattgtacagaccagcaaagttttcagcggaatgtgccgggcgccttgaataacagaggctgcggccgcacaggtcgacactgcaagctatcaaaggtaaacaattgcggtcgttcaatcaggtagccctgagcgtaatccacaccaatttcgagtaacgcctgttcgatgtgcggtgtctcgacaaattctgcaattgtgcgcttacccatgacatggccgatgtggttgatcacttcgaccatcgcgcggttaatcgggtcgtccagcatatcctttacgaaacttccatcgatcttcaggaagtctacaggtaaatgtttgagataagcgaatgaggacattccggcacaaaagtcatccagcgagaaatgacagcctaaggctttgagttcattgataaagcggatcgcactgcccaagtttgcaatcgcactggtttcagtgatttcaaaacagatcatgcccggcggaatattgtatgtatgaaacttctcacgcaaaaacccaaggaagtcatcatcaccaatggtgatgcctgacagattgatcgcacacatggccatggggcgccccgggcgttcctgcatgcagcggttgatgatcttgaacacattctccaccacccaacggtccagcgacgtcatcaagccatagcgttcggcggccgggatgaagctgtccggcaggatgatacggccagcctcgtcatgcaggcgcagcaggatctcgatatgcccattgccgccgtcggtgtgccccaggggtgagatttcctgggcgtagaggcagaaccggttctcctccagggccatgtgcaggcgctgcacccaggccatttcgccaaagcgcacggacagttccgaatcgtcggcgtggtacacctgcacacggttacggcccttttccttggccatgtagcatgccatgtcggcggcgcgcagtgaggtttccagggttgtcggggtatgcccaaggtgcaccaggccgatgctgacggtggtcatgaacggccggcccttccatacgaagtgcaggctttgcacggtgtggcgcaggctctcggcgattttttcggccaccgccgccgggcagttctccagcaggatgccgaattcatcgccgcccaaacgtgccagggtgtcaccttcgcgcaggtccgattgcaacaacgcacagatgtgccgcaacagctcatcacctgcggcatggccacaggtgtcgttgaccagcttgaactggtcgaggtcgaggaacatgagtgcatgccgcccgccctgctgcgaccccgtggggtgaagcacctgttccaggcgatactcgaactcacgacgattggccaggccagtcagggcgtcgtgggtcgcctgccaggacaggttggcgatgtattgacgctcctgggtcatgtcgtgcaacaccagcaccgccccggtcaccttgccggcgctgcggatcggcgcgcccaccagggtcaccgagaccgtactgccatccaggcgctggatggttttcgagtgctcgctgccgccgccaagctggcccttgacgatatgttcgatcaaggtaaagccatcgggctgggcattgtcatccagcaggttgaacagggccgccaggggcagcccctgggcctgggcagaattccagtgggtcagcgcctcggccgccgggttcatgtaggtgatggcaccgtcaacatcagtggtaatcaccccgtcgccaatcgactccagggtgatctgcgcccgctccttctcttgttgcagggcgtcggcaaaggcgtggcgttgggccagcagtttatgcgtgcgcaacagcgccagcacaatcaggcccaacgccgtggccaggttggtgatcaccagcagccgcaggatcatccgcgaaccttcgcccagggcatcgctgaacgccttggcagcgggcgtcacaccttcgttgatggcagtgatatgtgccttccattggcgcacatcgttggcgctgacctggtcgcggctgattgcaccgtgcatctcgcgggccaggtcatccagttgcaccagatagccatcgcccacggtccacagctcgatggctttttccaggtagctgaaatggcggaagttgaggtacagccagatcaggctggaaacgtcatccgggtggttaccgcccttgaggatgcccaggcgcgcggcagcaagatcaggggtggagcggtccagggcaatacgcaattcatgcccgccctggggcacggcgatcgcctgctggtatttgagataagtggtttcgtcgcggttgtcggcatacagcgtcaggtagtagatcgcatctttctggcccttggaccacaggctttcgccagccacataaccacgcaccgccgagagcacgtagaggctgacgcaacccaacaatgcctggaacagcaccacggcgataaagggccagacaatgcccaacaaccgtggcgttccgagagtccgcttttgcttcatgaagccccttgcacatgcactgctggatacgcacgcgaaacaccgcttccgatagctcagcctaggctaaatcaacgtacttgttgcaagtgcccgtagagtttggcgtacaaaccaccgtcagcaatcaattgctgatggtcgccatcctctgcaatgtgaccgccgtcgaacactaagactcgatctgcctgcttaaccgccgacaggcggtgggcgatgatcagtgtagtacggccgctgaggaagcgcgccagcgcctggtgcaggttgtactcggtggcggcgtccagggcggaagtcgcttcgtcgaggatcaccactttcggttcggccaacaccatgcgcgcaatcgccaggcgctgacgctggccgccggaaaaccgcaccccggaacgccccaccacactgtccaggcccatgggcaacgccttgaccgtcgcatccagttgggcgatttccagtgcctgccagcaggcctggtcactgcgctcgcggcccatagtcaggttggcgcgcacagtgtcgttgaacagcgcgggatgttgcagcaccacggcgacgtgctcgcggatggtctccaggccgatgtcctgctgggtggcaccgccaaagcggatagtcccggcctggggcgtgtacaggcccagcagcagttgcaccagggtgcttttgccaccgccgctggcgccgacgatcgcgaccttttcccccggtgcgatggccaggttcaactggtcgaggaccaggtcttcgccataaccgaaactcaggccacgcacttcgatgccgacggtttcgcgcccggtgaacgggtcttcgccgcccgcatattgcggctcatcggcccgtgccagcagctcgttgatccgcgtcagcgccccgcccgccgcatagtaggcatattgcaggttcagcaattgctccaccgggccgatcatgaaccacaggtaactgaacaccgcgagcatctggccgatggacaagtcggaaaacagcaccgtgagcatggccgccgcacggaagatgtcgatgccgaactggaacagcaacccgctggcgcggctggaagcatcggttttccactgggagtggatcgcgtagtcgcgcacttcctgggcccgctggccgaggcgcccgaggaagaagccctggcggttgccggcgcgcacttcctgaatggcgtccagggtttcggtgagtgcctgggtaaaccgcgaagtgctgtcgttttccagcttcttcaggtgtttaacgcgtttacccaactgcaccgtggcgtagatcaccagcgggttgaacagcaggatcagcagcgccagttgccaatgcatccacaccaggatcgccgacgtgcccaccagcgtgagcatcgccaccaggaaccggctgagggtttcgccgacgaatttatccagggtatccaggtcggtgaccaggtgggtggtgaccgtgccactgcccaggctttcgtattcgccgagggaaatacgcttgagccgttcgatcaggcgcacgcggatgcggtacacgatgtccttggccaaccgcgcaaacaaccgcgcctgcaccacgttgaacaccagcgcgccgcagcgcaggaacagcgtcaccagcaacatcaggccgatatagccggcggccttctgccagcccaggggcaaggcgtggttcatcactttgagtgcggcatcgccacgacccagcagcacttcatccaccagcaacggcaataacagaggaatgggcacgctgcacagggtcgccagcacggcgacgccattggcgatccacagggacttcttgtggcgcagggccaggcggcgaatttccgcccaggtcaggcggtcagtgcgttgaggttgctcatgcacaggtggctcgctccagccatcggcccagtagcggcgatagctcggacagcggctggtaaccgttggtcagcaacgccaactggccattgcgctcggccagcagcgtggggaaaccggcgatacccaggtcctgcacccaggtaaaatcggccgctgtggcggcgtgctgctcggcgcggtcaaattcgccggcaaactcgatgcgcgggatacccgcctgctcggccagctccaccagcacactggcgagggtcacatcgcgaccttcgacataaaacgcacgctggatcagccccagcagcttccacgcgcaatccggcgccaggctgcgcgccgtgacgatggcgcggcacgccggctcggtgtcatacacaaaaccgtcgggcagtgcgccgtcacgcttgaacggctggccggtggcgtcggtcaccgcctgccagtgctccaggatgtaccgtcgcgtggtcggctccagcgccgcgccgctgccggtgcgcaagccgcccaccaccagatgcagctccacgccggccgcctgggcctgctccaccaacgcctcggccaccggggcaaagccccagcaccaggaacacatcgggtccattacatagagcaggcgcgcggacatggctcaggcctcggaaggagtttgcttgtaattgaagccaatcgggtgcggcatgttacgggccttggccagctcgatctgcttctggcggtcaatcgcactgcggcgggtcttctccggcagcttatcccagcagtgcgggcagctgatgcctgcgacatagtgctcggaggcgcggtcctcaacactcacgggtgtgcggcaggcatgacattgatcgtagtcgccttcgctcaggtcgtggcgcacggtgacgcgattatcgaaaacaaagcagtcaccctgccatttggtttctgcctgcggcacctcttcgaggtacttcaggatgccgcccttgaggtggtagacctcatcgaaaccctcgctgagcatgtagctggaggccttctcgcaccgaatgccgccggtgcagaacatggcgaccttcttgtgcttggccgggtcgaagttggctttgatgtagtcgggaaattcgcgaaaactggtggttttcgggtcgattgcgccttcaaaggtgccgatcgacacttcgtagtcgttgcgagtgtcgatcaacagcacttccgggtcgctgatcagcgcgttccagtcctgcgggtcgacgtaggtgccgaccttcttgttcgggtcgacgccttcgacgcccagggtcacgatctctttcttgagcttgaccttggtgcggtagaacggctggtcgtcgcagtaggattctttgtggtcgatgtcgaccatccgcgggtcgttcttcagccaggccatcaagccatcaatgccttcgcggctgccggaaacggtgccgttgatgccttcttcggcgatcagcaaggtgcctttgatgccgttgtcgaccatcgcctgcagcagtggctcgcgcagggcgacgtaatcttcaagggtgacgaacttatacagtgccgccacgacaatcggttgagtcatgggtgttctctccaggtggctaccctcgtaaggggtgaaccggatgcaaaaaaaacgcgccggctaggcggcgcgttgcggattctaacaaatgcccggtgtcagagacacccgatcatcaatcatgcccgccggcgcaggtcggcgaggccggggctgcgtcgattttcgcccattcatcaggcgtgtaggtatgcagcgccagcgcatgaaactcgctcatcaggtcacccagggtggcgtagaccttctggtggcgcttgacgcggttgagcccctcgaactgcgggctgaccagcacggccttgaagtgggtctgcaagccacggctgtgcatgtggctttcatccagcacgctcaagtggtcggtgcccagggcggcaagcgccgtttcgatacgctgttgcatggtcattcctgcttacttcttcttggccggtgcggcggctttaggtgtcagctcgttggtcatgtcttccaacagcttgttcaccaccggcacggcgctttccagcttggcctgggtcatctgggccgattgctgggtcagttgcggcattttttccaggactttcttgcccagtggcgactggtagaaggcaaccaggtccttgagctcggattcgctgaagttggtggtgtagagcttgaccatgtccggcttcagcttcggccagccgatggcctggtcgagggcggcgttggccttggcctggtagctgtcgagtacggactgcttggcggcaggcgccttggtctgttcgaaacgctgggcgaacatttgctgcacttgcatgtacaccggggtacccagcttgtcggcatgggccagggtaaggaaggcttcggcactggcgttgtggctggcggtatcggcaagaacctggccgctggcgcaaaccagagcaaccgcggtacagatggcacgaagacgagtcatcgagtttccttttctagcaggcgaggtaagaccccaagggcgcccattctgcgcctaaaaaaccttggggctcaaccccgggccttgtcggacaaggattgcccgatgaaaagtctttcaggggaacccccaaggctgatcacagcctaaactgcgcaaacgaacctgaaggagtgtgcccgatgagccgtatcgaaaccgacagcctgggagaagtccacgtcccggatgacgcttactggggcgcccagacccaacgttcactggtgaacttcgccatcggcgagcagcgcatgcccctcgcggtattgcacgccctggccctggtcaagaaggcggcggcacgggtcaacgaccgcaatggcgacctgcccgcggacatcgcccgcctgatcgaacaggccgccgacgaagtgctggccggccagcacgacgaccagttccccctggtggtgtggcagaccggcagcggcacccagagcaacatgaacgccaacgaagtgatcgccggccgcgccaacgaactggcgggcaataagcgcggcggcaagagcccggtgcaccccaacgatcacgtcaaccgttcccagagctccaacgactgtttccccacggccatgagcatcgccgccgtgcaggcggtgcatcaacgcttgctaccggcgattgccagcctgtccggcgggctggcggagcaagccgccaaacatatgaagctggtgaagaccgggcgcacccacatgatggatgccacgccgatcaccttcggccaggagctttcggcattcatcgctcaactcgactacgccgaacgtgcgatccgcgccgccctgccagccgcatgcgagcttgcccagggcggcaccgccgtgggcaccgggctcaatgcgccccatggcttcggcgaggcgattgcctcggagctggcggcgctgtcgggcttgccgttcgtcaccgcgccgaacaaattcgccgctctctctggccatgagccgctggtgacgctgcacggtgcgctgaaaaccctggccgtggccctgatgaaaatcgccaatgacctgcgcctgctgggctccggcccgcgcaccgggctggccgaggtgaaattgccggccaacgaaccgggcagctcgatcatgccgggcaaggtcaacccgacacagtgcgaagcactgtcgatgctggcctgccaggtgctgggcaatgacgtgaccatcggcattgccgccagccagggccacttgcagttgaatgtgtacaagccggtgatcatccacaacctgctcgagtcgatccgactgctggccgacggctgcaacaacttccaggaacactgcgtggccgggctggagcccgacccggtgcagatggccgagcacctggagcgtgggttgatgctggtcaccgcgctcaacccgcacatcggctacgacaaatcggccgagatcgccaagaaggcctacgccgaagggttgacgctgcgggaggccgcgctggagctgggctacctcaccgatgcggagttcgaccagtgggttcgccccgaagacatgctgggcgcctagcctaggatgccatgcgcaaccgccgggccttgagcccggcgagcaacgacggcgccagcgccacggtcgccgagcccagcaccaccaccaacgccccggcatagcccagggcgttgatctcttcggcctgcacatagtcgggccacagccaggccgccagggccaccgccacaaaggtcaccaacggcgtgagtgccagggtcgcactgacccgtgaggcctcccaatgggccagcgcttcggcaaaggcgccgtaggccaccagggtattcatgcagcacccgagcaacagccagccttgcagcgggctcaggtccaatgcctccagcggatgcgcccaaggcgtaagcaatatggcgcaggacaggtagatcaccatcatcacctgcagcgagttccacaccgtcaacagttgtttctggccgagggcatagaacacccagatcgtggtggcgagcaggatggtcagcacgccggcggtgtaggcgccgagcgaggtcagcagttcttccaggcgctggttgaagaacaggccgaatcccaggatcagcaccaccaaccccaacccctgccccaggctgaagcgctccttgaagacgaacacactggcgaccatcaaaaagatcggccccatctgtaccaccaattgcgcagtgccggggctgagcaatttcaggcccaccaggtacagcacgtagttgcccaccagcccgcacaccgccatcgccaccagccagccgcccttggggccgagtaccttgcggctgggcagacgtttggtcagcgccaggtagatgaacaggcaactgccggccacgatcaggcgaaaccaggtgacggtgatcgggtccatcacctgcagcacctgcttgagtttgatcggcagaatgccccacaggaacgcggtcagcagggtcaggagaaaaccatagacccagcggccggaagagatgtgcatgagtaccccagaagccggaggaagtggagccgcattctaggggcacccgatgcactttgtgtagcgaacacttaacttgccgatcagcgcaccgcttcgaacaacccggtggcccccatgccgccgcccacgcacatggtgacgatgccgtaacgcaggttgcgtcgctgcaactcacgcaccaggtgccccacctgccgcgagccggtcatgccgaatggatgaccgatggaaatcgagccgccgttgacgttgtacttggcattgtcgatttccaggcgattgcgcgcatacaggcactgcgaggcgaacgcttcgttcagctcccagaggtcgatatccgccacctgcaagcccttggcctggagcaacttgggcaccgagaacaccgggccaatgcccatctcgtccggctcgcaaccggccacggtgaagccacggaaaaacgccttgggcttgagccccaacgccagggctttttccaggctcatcaccagggtcatcgaggcgccgtcggagagctgcgaggaattgcccgccgtcaccgagccatcttcggcaaacaccggcttcaaaccttgcagactcgccagggtagtgtccgggcggttgcagtcgtcacggtcaaccacgccatcaagaatctgcacttcaccggtgtgcttgtcctcgaccttgtacttgaccgccatcggcacgatttcatcgttgaacagcccatcggcctgggcctgggcggtgcgctgctggctttgcagggcgtacaggtcctgttcttcgcggctgacgttgtagcgacgcgcgacgatctcggcggtctggcccatgggaaaatagatacccggcacctgctctttgagcagcgggttgatcaggttgtcggtgttgacgcttttcatggtcaggctgatcgattcgacgccgccggcaacgatgatatcgctgcaacccgaagcaatctggttggccgcaatggcaatcgcctgcaagcccgacgagcagaaacggttgagagtcatgccggctacgccagtgcccagttgcgaaagcaccgccacattgcgcccgatgttgtaaccctgggcgccctcgttggagccggcgccgacgatgcaatcctccaccgtcgccggatcgataccgttgcgggtgagcagcgcgttgacgcaatgggccgccatgtcatccgggcgggtctggttgaacttgccgcgaaaggacttggccaggccggttcgcacgctgtcgacgatcactacttcacgcatgggctacctcgatcttgtggttgttggatcgagcatagatcccaccctgcgccatcgcgacgatcattcaccccatagatacaaaaccatggcggcccggctcaccgtggcgagcaggcttgttgtggcgagcaggcttgccctgcgttggggcgcgaagcggccccgaatcaggcaccgcggttcttcaggcacgactgagttggcaggttttagggctgcttcgcagcccaacgcggggcaagcccgctcgccacaacgagctgcatcattatttctttttctttttgtcgtgcttgtcggacttggcgaacgcctcttccagcgccaggttgatcgtgcgcaacaccttgacccgcgcccagcgcttgtcattggcctccaccagggtccagggcgatacctcggtgctggtgcgatcgaccatatcgcctaccgccgcgcggtagtcgtcccatttgtcgcggttgcgccagtcgtcttcggtgatcttgaagcgtttgaaagggatttcctcgcgggcctggaagcgctccagttgcgtgtccttgtcgatggccagccagaacttgaccacgatcacaccggcatcgcgcagttgctcttcgaagtcattgatctcgccataggcgcgcatccagtcggcaggggtgcagaagccttcgatgcgctccaccagcacgcggccataccaggagcggtcgaacacggtgaacatgccgcgtgccggaatcttctgccagaaccgccataaataaggctgggcgcgctcgtcttcactgggcgcggcaatcggcacgatgtggtactgacgcgggtccaacgccgctgccacccggcggatcgccccacctttgcccgccgcgtcgttgccctcgaacaccgtgatcaaggcgtgcttgcgcatgcgcttgtcgcgcatcagtccggagaagcgtgcttgttcggtgatcagttgttcttcgtaatcgtccttgtccaggcgctgggacaggtcgaggctgtccaacaggctcttcttgtccaccgaggcgatcaagggcgccgggttcatgccgctggccttgcccttgggcagcttgagcgcattctgcaggccttcgagcaggagtttgcccacggtgaggctgcggtagttgctgtccacgccttcgatcacatgccacggcgcatagtcgcggctggtgcggcgcaacacgcgctcgccgaagtgcacgaatttgtcgtaagtctcggattgctgccagtccagcgggctgatgcgccagctgtgcagggggtcatcggccagggccttgagccgcgctttcatctgctttttggagaggtggaaccagaacttgaagatcagcgcgccttcatcgcagagcatcttttccaggcgttcggcgccggcgatggcctggtccaggcgggcgtccttgatctgcccatgtacacggctttgcagcatctggctgtaccagttgccaaagaagatacccatgcggcccttggcgggaagttggcgccagtagcgccaggccggcgggcgcgccagttcttcgtcggtctgctggtcgaaggtgcgcacttcgatcaggcgcgggtccatccattcattgagcagcttgaccgtctcgcccttgccggcgccttcgataccgttgatcaggataatcaccgggaagcgcttctgctgctgcaactcgtactgcacctccagcaaggcttctcgcaatgcaggcacttcggcctcaaaggtgtctttgtcgatggcgtgaccgatttcggcggattcgaacatgggcagctccgtttcaagatggctcaagactagcggattgggcaacaacacgcgggaggaaattccaccggcgcttgccgtgggtcaattcaacgtcggttgatcggctagaatgacggccttgtctttaccgagccgcccatgaaccctatcacccacgcccagctcgactgggatgaccaaggtcgcccgcactcgcgaatcttcgacgatgtgtacttttccgataagtcgggccttgaagaaacccgctatgtgttcctcgaacagaaccgcttgcaggagcgctttgccgcgctgcccgccggtgggcggctggtgattggtgagaccgggttcggcacggggttgaatttcctctgcgcctggcaactgttcgaacaacacgcggtagccggtgcgcgcctgcatttcgtcagcgtggaaaagtatccgctgagccatgccgacctgcgacgcgccctgctgctctggcccgaactgcaccccttcgccgaacaactgctggcgcaatacattgccatccatcagggcttccagcggctggtgctggataacggccgcgtgaccctgaccctgctgatcggcgatgccctggagcaactgccgcaactggatgcgcaaatcgacgcctggttcctggacggcttcgccccggcgaaaaacccggagatgtggaccgccgagctgtttgccgagctggcacgcctggcggcgccgggctcgaccatcagcacgtttaccagcaccggctgggtgcgtcggctgatcaacgccgccgggttcaagatgaaacgtacgccgggcattggccacaagtgggagatcctccgtggggagtttctcggttggccggccgacacaccggtaccggccgcgaccaagccgtggttcgccaggccgcccgcccttgcgggtgagcgtcacgcactggtgatcggcgccggcctggcgggctgcgcgacagcggccagcctggcggccaggggttggcaggtcagcctgctggagcgccatgacggtgtggcgcgggaagcctccggcaacccccagggcgtgctgtacctgaaactgtcggcccacggcacagccctgtcgcagttgatcgtggcggggtttggctacacccgccgggtgctggagcacctgcatcgcggcgtcgactgggacagttgcggcgtgctgcagctggccttcgacgccaaggaagcccaacgccaggcgcaactggccgctgctttcgcgccagacttgctgcacctgctcgaccgcgaccaggcccaggcccgcgccggtgtcgcgctggcgcacggtgggctgtttttccccgaaggcggctgggtgcacccaccggcattgtgcgaatggcaagcacaccagccgggcgtgaccctgctgccctaccacgatgtgctcgacctgcggcacgtcgacggtcagtggcaagcctgggacgctgagcgcctgctcgccagcgccagcgtggcgatcctggccggcgccgccgaggtccagcgcttcgccgacctgcccctcaagcgcattcgcgggcagatcacccgtttgccgcagaccgcctacagccaggccctggccacggtggtgtgcgccgaaggctacgtcgccccgccacgcctgggcgagcacaccctgggcgccagtttcgacttcaagagcgatgaccttacgcccaccgccgctgaacattccgggaacctggagctgctccagggcatttccgaagacctggcccagcgcctgggcgccgacagcctggcgccggaagccctggaaggccgcgccgcgttccgctgcaccagcccggactacctgccgattgtcgggccattggctgaccgccaggcgttcgaccaggcctacgccgcgctgcgcaaggacgcccggcaagtgcctggcgccgcctgcccgtggctggacgggttgtatgtcaacagcggccacggctcaagggggctgatcaccgccccgctgactgcggagctactcgccgcctggctggacaacgagccgctgccggtgccgcgcgcggtggctgacgcctgccaccccaaccgtttcgccgtgcgggcgctgatccgcaccaccaccggcaaggccgaatgatcaaccggccggggcctcacacacggggcccagcccttcggttctgatggcgtcctcggtcaagcgctcgatcagcacgctttcagcctgctcccgttcactgaggacggtgtgcatgcgactccggtaatcggcatcgctcagtaccaggctttgttcgaagatgtcattgaggcgctcatcatagggcgtgttcaaggcctcgaagcgagctgcatgggcacgcttgaggtagtcggtccagaacggcagcttcttgagatacgtcatcagctcgggggacagctcggccagcgtgacttcggccttggcttcatccagcgccaactgagtgacctcccccagccgcgaatagcgcatgtgtcgaggctggccgggcaaatagaattcgccgaccaggcctgtgcggaacgccaggctgacctccaatggatcggcggcaggatgcaggccactgtgacggcgcgcaatcgcctccaactgctccaggcgaaacaggccacgacccagtttcaacagcggcttgggcgtcagcgcacgcccctggatgagggccttggcatcgctgatttccaccaggacttccaggctgctgaagttgacggcggcggcatcgtcacaattgatcggcgtggcggcccggtcgaatacttcctcacgcagttcgctgttcattgcggcagcctccagcacccgccaaacgcgtcgctgcaggtcctcacgcacgaactcggcgtctttggtgccgcccagttccgcgagcaacttgaacagggcgtccgaccggtgatcgtccttgaggctcgtccacgtgagtttcttcgccgcatagcccgccatccgttcgtccgccagccacagttcgcgtgcgctctgctcgttcaagcgggcaatgtcatcttccaggaaccccatgcccggaccgtacgcctgacggtagtttttcagggccagttggctttgcgccgataacgggttgtgccgcaagttgacgccctgggcaacgtttcgcggcacgcgtagtagccactccggcagcacgctgatgtcattggcgcgcaaattgatatgttcaagataaggcaggcgccacaggtccctgggcagttccttgagtcggcagttgcgcaacaccaggctacgcagcgcgaacatacggctgatatccggcgggtccagcaacgggttgtccgccaggttcaacaccttcaggcgcgtcagatcggccagcttggcacgggtgtattcggtgagctggagtttgttgttgctcaggtacaaccgctccaggcccggcatgtgcaacagggcttcaggtagccgggtcatctggttttcgcctagttcaagggtgcgcagccccttgaagtggctgaggaaatacgccacatcgtcagtcaggttcaaacggcgcagtgacaaatgctcgacgtgatcgaaacgcacctgtgcgggcaatgtcggcagagggccgatgaccatatcatcgagcaacagcccaggaacctggctggcgtgctcatcgggcagggtcgacatccgtcgccagcacttttcgatgctcttcgccgcctggtggcggctcaatcgatagtcccacagggggtcggcctgcacgatattgacagacttctcggcacgccagcgtttgagtgccgtgtgcagcgcttcaaactcctgctcgcgtgcctggaccgccttggcacgcgacagatgatcatggcccgcatcgcgcaggaaatcgttgacctgcgacggactgagcaagggatagagtttgttgactttacgcaccaacgccgccgggaaatgctctgcctcggctcgcgccgcctgggtacagatcagcggctcttcgtccagcagcccgcgttccggccacaggtaacgggcgaccctgtcacgctcatgcaccgcggtagcacgcaggcggccgcgcaggtcggccgcctcgttctcggcctgaagcttcaatgcaatgcgctggcgtggcagcaggctatcgaaaagcgccgtgtacaagccgtccgcgcctgtcgcgaccggcccgagggccttgcctttttgatcgaatgcctgatacccctggggcgtactgaccagggtcctctgcgttgcagctgttgacgcgcccgcctcggccagcacctccccgctcagggtttgcctgcgcacctgcaacgccaggtctcggggccagccgggcatttgctgcagcataccgacggccacgcgtcgggtgccgtcccccgccaattccggccagtacaggcccatcagtgcgcggtcctgctccaacaggtccaccgtctcgcgcgcccgctgggcaagcaccagcggtacctggccggtggtgcgcaaataccggcgctcccataatgtggcctgtgagtacagctcccacgccatgcggggcggcagttgtttgaagcgctcgcacaacggcaccaattcgttcagggcaacaccggcgtaataggtgtacaaatggtcgaacacggcttgatgccggctacgcagcgtgtccagcagacgacgctccagcgtactgcgcatgtcgtcttccgccacacccttgcccaacaggtcgccacgttcctcgtcgctcaagtgctccagcaaggtgtccatgacccgcccgtccctcaactccttgcgggtgatatggatgctcaggtcctcataatcgaaaggtgctgtttccggatgcctttccagcagttcgccctcctcgtccagcacctcgaaaaaacgcccttggggccagcctggcaccagcggcaatgcaaacaattgcgcgcgtgcggtactcgcatcgggacgttcaccacgctccaggtactccatcagctcacgaaccctgtcgttttgcttatagcgcagcactgcgtcatgaaaacgctcgggtaacggctcgtaggcactgcccaacgcctgcaggtgtggcagggtcattcctgtgagggtcgccaggttcgacaatggctcagcgggcaattcgtcaaggcttggatccagtcgcctgaggctgtagacggggtcttcccattgcaaggggcgctcgtagacatgctgccagccaccacggaagttgtgctccagcggcgggcgataagcctgcggacgccgtggatggatgacccgccacttctgcaatcgggtatcgaacgcaaccgaatagtggtttccccccatgcggatgtaggagcggccgttgacttggtacacccctcgagaactggccacggcctggcgtgcgaccggctcaggctgtcgataggcattgagccttggccgccagagtttctggccctgatcggcagtgttgacggcttcgaacttctcgaagaactgcgcagacgttgtcagggtgcgcttcaacgtccccactacccgcccgcccgccacgaacaacgccatggccgcgatattttcagccacattcaccagatgcttgagggcctcggtatgctcatcgtgctgccagtcctcgacggcctcgaacacttcacccaacagctgtccgacggcgaccccgagcatcaactgccccaacaccggcaccaccaacgacgccacattcagcaggtccagccccaggtccagatagcgctgcatgcgctcttcactggcttgctggtcgacctgggccttgggtaccgccagtaccagcgcgtccaactgtatcttgccgacaaatgcctgaaagaagaacccggtcaggctggtcgtgacgggtaaggcacgcagctggccaaccttgcgcgtcatgtcgaacgagtcgaaaaaatccaggcggttgccctcatccacgtacccttcgaaaaacgtccggtagctcttgatttgcagcttcaaggacaaatacaccttgaagtcttccagcgtcggatactcgtaccagggcctggagggctcgttcggcatgtagacaataaaggggccggtatccaggctgcccggtgcgctgtcggaaaacaccaatacactccacacgcaggtgccatcgatgttcaagccctgccaattgatcaggccgttgcccggcagcctgctcctgagttcactggccggacgatcgaacccgatcagcttgagcaaccgcgcgtaggtcccggcttcgatatgccccttgcacaaggcaatatgcagatccatgcgcatgtccatgagtttgcccaggccaatactgacggcaacctggttgtaggagctgacttcctctttgcttttcgggtcgggcaggtcgaagacctcttcgatgtgcttttgatagagcgcccccaggtccagctcccggcaatgaccgacaaattcaggcaccgtcatccccaccatcggctgcctggtggccgcagagcgcactacagctgcgacggacatgcccccgggctcagcgcgctctgcagagaaattctgcatcgccgcatgcagcaggctttgcttggtataggtaacggtctggagcaagccgccgcccaggtccgggctcaccccagtgagcttgcgcctgggcaactccagcaggtctcgcctgacatccggcgactccacccctttggcccgcagaaaattggtcaagcgctctgcgcagtattgatccagcggttccaggcggctcaacaggtaacggacattctcacgaatcaccttgctgtcgatatgcgtctgttcaagggcggtgagtgtcgaagcgtcggcttcaaccaaccagtgcggcacggttttgcgcaaaacctgcgccttgtccaggtcggcggtgatgtcgagcaatgccctgtccagttcatcttgagtcgctcctgcggcgacctcactcaaatcgcgtttttgcgtcatcggcatgtttcctcagccagctgaacatgaagccaaacgataagcctggaccgggccgcatccgggtatctgtctaccgccctgcaaccaccttcatccgcttataaccgattgatctaaaactccacgaatagccccgtgtcagtttctgggtacgcgccctgtcgggcgtattgagttttatgctccccaacggaaaaaccggtaaggaatttatgtgcggattagctggagaattacgtttcgatgcccaacctgccgacctggcagcgattgaacgcatcacccatcacctggccccgcgaggcccagacgcctggggctttcatgcccaggggccgatagccctgggccatcggcgcctgaaaatcatggacctgtcggacggttcagcccaaccgatggtcgattcgcacctgggcctgagcctggcgttcaacggcgcgatctataacttcccggaattgcgagaagagctggaagccctgggctacgccttctattccggcggcgacaccgaggtgctgctcaagggttatcacgcctggggcgaggcactgctgcccaagctcaacggcatgtttgccttcgcgatctgggaacgcgatgcccagcgcctgttcatcgcccgcgaccgcctcggcgtgaagccgttgtacctgtcgcgcaccggtcagcgcctgcgctttgcctcggccttgccggcgctgctcaagggcggcgatatcaacccgatcctcgatccggtggcgctcaaccattatttgaatttccacgccgtggtaccggcgccacgcaccttgctggcgggcattgaaaaactgccacccgcgagctggatgcgcatcgatgccagcggcaagaccgagcagaagacctggtggaccctgccctacggcccacgcgaagatgaaaaaaacctgagcctggaagactggaccgaccgcgtgctcgatagcacccgcgaagccgtggccatccgtcaacgtgctgcggtggatgtgggggtgctgctctccggtggtgtcgattcgagcatgctcgtcggcctgctgcgtgaagtcggcgtacaggatttgtcgaccttctccatcggctttgaagacgccggtggcgaagccggcaacgagttccaatactcggacctgatcgccaagcactacggcacgcgccaccaccaattgcgcattgccgaaagcgagatcatcgagcaactgccggcggccttccgcgccatgagcgagccgatggtcagccatgactgcattgccttctacctgctgtcgcgggaagtggccaagcattgcaaggtggtgcagagcggccagggcgccgatgagctattcgccggttaccactggtacccgcaggtggacggtgcggccgatccctatgcagcctatcgcgatgcatttttcgaccgcagctacgacgactatgccgccactgtcgcgcccaaatggctgaccgccaacgatgcggcgggcgacttcgtgcgcgaacatttcgccatgcccggcgccgatgcggcggtggacaaggccctgcgcctggacagcacggtgatgctggtggacgacccggtcaaacgtgtcgacaacatgaccatggcctggggcctggaagcacgcacgccgtttctcgactaccgcttggtcgagctctcggcccgcgtgccgggtaagttcaagctgcccgacggcggcaagcaagtgctcaaggaagcggcgcgccgggtcatcccgagcgaagtcatcgaccgcaagaaaggctacttcccggtgccgggcctcaagcacttgcagggcgataccttgaactgggtacgcgaactgttgctcgacccgagccaggatcgcggcctgttcaactccgccgcgctggaccgcttgttgaccgacccgcagggccaactgacgccgttgcgtggctccaaactgtggcaactggcagcgctgaacctgtggctcagcgaacaaggaatctgattgatgaaacctctcgcagcggcctatagccaacgcttgctcaagggccaggcgccgacctacgagcgcctgcaggcgcgcctggcggaagacggcagccccctgggcgccgagccgattgcggtgcattgcggctggggccggttgttgatcgggcataccttccccgacccggccagcctggcccaggaactgctccatgagcagccgggtgagcgtgatatcgcgttgtatgtggcggcgccccagcagatcctggggattgatccccagcagctgtttctcgacccctccgacacgctgcgcctgtggttcagcgactatcgcccggctacccgggtgtttcgcggcttccgtattcgacgggtgcagaccgaggccgattggctggcggtgaatcagctgtaccaggggcgcggcatgctgccggtcgacgccgaacgcctcacaccgcgccatcaaggcggcccggtgtactggctggcagaagacgaagacagcggcgcggtgatcggcagcgtgatgggcctgaatcaccagaaggcgtttcatgacccggaaaacggttgcagcctgtggtgcctggcggtcgacccgcaatgcacgcgacccggcgtgggcgaagtgctggtgcgccatctggtggagcatttcatgagccgtggcctgagctacctggacctgtcggtgctgcacgataaccgccaggccaagaacctttacgccaaactcggtttccgcgcgctgaccacctttgcgatcaaacgcaagaatgggatcaaccagccattgttcctcggccctggcccgcaggcggggttcaacccctatgcgcggatcattgtcgaggaggcccaccggcgcggtatcgatgtgcaggtggatgacgccgatgccggcttgttcacattgagccatggcgggcgacgtgtgcgttgccgtgagtcgttgagcgacctgaccagcgctatcagcatgaccctgtgccaggacaaaagcctgacgcacaaggtgttgaaggccgccggattgaaactgcccgcgcagcaactggcgggcagcgcggatgacaacctggagttcctcgatgtgcaccagcgcatcgtggtcaagccgctggatggcgagcaaggccagggtgtggcagtggatttgcagagtatcgaggaggtgcagcaagccattgaagcggcgcggcaattcgacagccgtgtgttgctggagagtttccaccaggggctggacctgcgcatcctggtgatcggcttcgaggtggtggccgccgcgatccgccgcccggcggaggtgactggtgatggtcatcattccatcggtgcgctgatcgaagcccagagccgccgccgccaggctgcgaccgatggtgaaagcaaaatccccctggatggcgaaaccgaacgcacgctgaaagccgctggctatgactacagcagcatcctgccccgtggccaggtcctgtccgtgcgccgcaccgctaacctgcacaccggcggctgcctggaagacgtcaccgccatcctgcaccccacgctggtggacgccgccgtgcgcgccgcccgcgccctggacatccccatggtgggcctggacctgatggtgcccgccgccgaccaacccgagtacgtgtttatcgaagccaacgaacgggccggcctggccaatcatgaaccgcaaccgaccgcggagaaatttgtggatttgttgtttccccatagctgaacgatccgaccttaggagtctttatgagccgaaccatccccgaaccggatctgaactacctgcaaaaagtgctgctggaaatgctcgccattcccagccccaccgggtttaccgacaccatcgtgcgctacgtcgccgagcgcctggaagaactgggcatcccctttgaaatgacccggcgcggcaccatccgcgccaccctcaagggccagaaaaacagccccgaccgtgcagtttcggcacacttggataccatcggcgccgccgtgcgcgccatcaaggacaacggccgcctgagcctggcgccggtaggctgctggtcgagccgctttgccgaaggcagccgcgtcagcctgtttaccgacaacggcgtgatccgtggcagcgtgctgccgctgatggcctccgggcatgcgttcaataccgctgtggatgaaatgccggtgagctgggaccatgtggagttgcgcctggacgcctactgcgcgacccgtgctgactgcgactccctggggattggcatcggtgactatgtcgccttcgacccactgccggaattcaccgagagcgggcacatcagcgcccgacacctggacgacaaagccggcgtcgcggcgttgctggccgcactcaaggccatcgtcgacagcggcgagccgttgctgatcgactgccacccgctgttcaccatcaccgaggaaaccggcagtggcgcagcggccgccctgccctgggacgtcagtgagttcgtcggcatcgatatcgcgccggtcgcccccggccagcactccagcgagcatgcggtgagcgtggcgatgcaggattccggcgggccgtatgactatcacctgtcgcggcatttgctgcgcctggcgtccgaccacgagttgccggtgcgccgcgacctgttccgctactacttcagcgacgcccactcggctgtcaccgccggccacgatatccgcaccgcgttgctggcgtttgggtgcgatgcgacccacggctacgaacgcacgcatatcgacagcctggcggcgctgagtcgtctattgggcgcctacattctcagcccgcccgtgttcgccagcgatgcacagccggcacagggttccctggaccggttcagtcaccagatcgagcacgagacgcagatggagagcgacacgcgagtgccgtcggtggacagcctggtgggcaacaagtcctgagactggcaactacggtcccggcgcagtaggatcgccgggatccatcacccgaggcttgtatgctgattccctacgatgcacttgaagtcgagacgctgacgcgcctgatcgaagacttcgtgacccgcgacggcaccgacaatggcgacgacacgcccctggaaacccgcgtgctgcgcgtgcgccaggcgctgaccaagggccaggcgctgatcgtgttcgacccggaaagcgagcagtgccagttgatgctcaagcacgacgtgcccaagcatctgttcgactgacgtcagagattgggcaccggcaccggatgggtgctggggtcctggcgatcgcggattttctgatgcacctccgcgcgatgcacatgcaccccggccggcgcttcaacgccgagtttcacctgggtaccgttcaactcgaggatatgcacggcgatgtcatcgccgatggagatgacttcgcctatggcgcggcttaagaccagcatggcggttgtccttttaacagtgaaaggacctcgaccatgcgcgcaggctgtgctgcgcatcaatggcttgccgtgaaatcaggcactacttacatgtgtaggtaaaatacctgacagaccactacccgatcagcccttggcagcctgtgccttggcgcgcattttgtcggccatgctggtcatttcgtcatacagcaattgcgggttcttctgcttcaacgcccatgccatgcgcccctgctcgtggggcaggatcatgaactcgccctccgcgacccgctgatagatgtagtcggcgatatccgccgccgaaatcggcgagctttccagcagcttgcccacctgggccttcatggcgggggtcggcccacggaacgaatccaggagattggtctggaagaacgatgggcacaccacatgcacaccgatttcctgctgcttgagttccaccagcagactctccgacaacgccaccacaccggccttggccacgttgtagttactcatggccggcccctgcatcagtgcagccatggaggcgatgttgatgatgcggcccttgctcttttccagcagcggcaggaacgccttgcagcccttgaccacgcccatcaggttgattgcgatctgccagtcccagtcctccagggacaactcggcaaagaagccgcctgacgccacgcccgcgttgttgacgatcacatcgataccaccgagcttgacctcacaggcctgggcgaatgcggtgagctggctgtagtcgcgcacgtcgcagcgctggataaaaccttcgccaccggcctcgcgcaccaacctgagggtttcttgcaggccgggctcgctgacatccgacaaggccaactgccaaccctcacgggcccagcgcagagcgatttcacgacccaggccggacccggcgccagtgatcatcatgcgattttgcataggaagctgccttgtggttcacggaagaagtgatcggcagtgtagcgaaggtttttcctgcccccatccaccatcagagtgatgaatgcccctggcaaaccgtgggccgggtcggatgtttgcgtatagcctaagttcaatatttttcaactaataggttttagttgcgagcgcattaaaagaaataagcacgtttgcgaaatgctttaaaaaaatactgaattttctgcgaggggccatagtcggagttgttaaggcgtctgtctttaatatgcgggcctatcgttaaacaaccggtctttgcagaaggccaataaggaaaaaaaccatgagcctcattctgatcattatcctgatcctgctgctggtcggcggtttgccagtgttccctcactcacgcaactggggttacggcccgtcgggtatcctgggcgttgtcctggtggtgctgctggtactgttgttgcttgggcgtatataaacgccaggcaaaaaaaagaggccctttaaagggcctcttttttatggccgattaattagtccggcttgccgttgactacacccgcggtgttatccaacagactcttggtggccgtctgcaggaacgactcaagtttctgcttcagcgccgcctcgtccggcgactcggggattactttaccggtcgggttggcgcccagttcgtattcccacaacttcggtggcatttccttcggcagcaccagaatgcggtctgcggtcaccaacgccacggtctgatcgctgcccgatggcttgatcacgccaaaacccttatcgccttccggcaggttcaacaggtcacggccccagcactggtgcagggtatcgccaccaaggcggcccatgatggttggcacgatgtcgatctgggtgcccacggtgtggtcacgctcgccgaacttttcctgcatgcctggcgcgatcatcagcatcggcacgttgaaacggcccaggtccatttcggtgatctgctgctcgttgccgaagccatggtcacccacgatcacgaacagggtttccttgaagtacggctccttgcgggccttctcaaagaactggcccaatgcccagtcggagtagcgcatggcagtcaaatgctcgttgaggctgccacggtcggtgactttctctaccggcaatggcgtcggcaacgcatacggcgtgtggttggacagggtttgcagcaacgcatagaacggcttgccgccttcacgcgccttgagctcttccaggccacggttgaacatatcctggtcggacacgccccacgtcgggtcggagaacaccgggtcgacgaagtcattgcgaccgatgaagttggtcatgccctggttgctgaagaagcccgactggttgtcccaggcgaaatcgccgttgtacacatacacgtcgtcaaacttgcgcgcgctgagcaactgcggcaggcccgacagcttgtgggtgccttcgggggtctgcatcaggtattcgaagcccggcaggttcgggaagcacgccatggtggcgaacatgccctggtgggtatgggtgccgttggagaagaaacggtcgaacagcaggccttccttggacagtttgtcgaagtacggcgtgatgttgcctggacgacccaaggcgccgaccgagtgaccggcgaagctctccatgaggatcacgaccacgttcttgatcggcagggtcttctcggccggcggcatgtagtcgcggcgcacggcagcgatgtcggtatccaccagcttctcttgcggcagcaccagcatgtcacgcacggtctgggtagccagcggctggtcgagggtggccttccagatgttggaacggtcttcgccgaagcgggccttggccgccgcaatcagtgacaaggtgccattgaggcccaactggttggcgaagttggagtcggtggtgtacacatcaccccaacgcagtggcgggccttggcgcagggtgccacggatggcgaccacggcgatcagcaggcagaccacgaacaccgcgatacgcgtgtaccaaggcgccacctggcgcgtgccgatgctgccaccgctgaacgggccacgcggacgtgtggcgcggtcggcgcctttgaacgccatgctcaggatcaacgtacccacggcccaggccagcaggtagcgcaccaccggaaaaccgtaccagagcatgctcatcacggtcttggggtcttccttcacatactggaagaccaggccgttgaggcgctggtggaactcgcggtagaagtccatctccatcaggcccaggaacagggcaatgctggacgcgacggtcagccacagacggaagaacccacgcgcggccatggcgcggacgctgaacaaggccagcagcagcgggaccaacgcgtacatcacgaagcggatgtcaaagcgcgtgccattgccgaacgcttcgaggaaggtcgaggccggcgtgtcgaggatcatttcgcggttgtacaccagcagcgccaggcgcagcagggagaacatcaccatcatgaccagtgcgcagagcagcgtgtacgccagatgggatttgacggtcggttgcagcaggcgattagaagctcgctgctgactcagggcgtccgggtttgccatgtcgtttcaggacccattggaagtttaagtgacgaagtagtgcagtggcgcgaatggtgcccgatcaacggcggcaaggctattaattactgaacgtgcaccggcgctccgcctttagcggctcttgggatagggccttggcaggaagataaagccggcgaattgtcttggacgggatgtgaaaattttgtgcagcgaatatttcgaaacacaaaatgaattgaagggaaaagccatggcctggcagctgtcgagccggggttcgacagctgccaggccgggcgcgcgatcagatccgcacattaccccgtggcccggcaatcgcccagatgatcaggcccagcaccggcagcagcaggatcaacaggatccacaacaccttggcgcccgtgcttgcgccgcttttgaacacgttgatgatcgcccagatatccagcgcgaggatgatcagcccgatcaagctattgaacgtggaacccatggtgtcgctcctaagtgagggcatgcccttgtaggatagtcagccctggcgggggttccgttttatttcagacgtgaacggcgactttcagcgcttccagggacggttcgcccttgatgcccacttcagcgcacagctccagcacgcgcggcaggtcgttgccgtagaccagcaccgcctggatttcgtcatcgagcaactggctgaagttgagcaatacgtagccgccatcctcggggctgagggcgctcatctggatctggatgcggttgagtgcggtcaggtcttcggtcttggccagttgcttgggcttgaggttgaacgccacgccggggccgaacgacgcgacgatctgcgcgaacaggtcaccataggtgtcggcctggaacagtacggtgtccggcaggctgccgaccaccacccactcaccgagtgggatggggaaggtgtcgtcgtagttgatatccgggttggccgccagaaacgcggccgggtcggcgtaagcctgggccgcttcatcggcgatgcgcgccacctcgtcctcgcccatgacgccggcgctgattttgctgatgagttcgacgagggcggttttcatggaaatgatcctgtagcgggctggcttttgagggcgcgtagcctacaccagtttctgcaactgcgccgccgtatccaccgcgcccatggtctgcgcggcagccagtgcggtggcgccattggcgtcggtggccttggggttggcgccctgccccagcaggtaatcgaccatcgcaacgcggttgaacatcgccgccatcatcaacgccgtacggccgtcggcagacgcggcatccaccggcgcgcccccttcgatcagcgccttgaccacgtccaggttgcccttgaacgctgcaccagccatcggcagctgattcttgtcgttggcgatctgcggatcggccttgaactccagcagcacttttaccgcctcggcgtggccgtggtaggccgcgagcatcagcagggtgtcgccgttatggttgcgaaagttggccggcaagcctttggccagcagcgcagcgagcatggcggcgtcgcctttacgggcaacgtcgaagacctgttcggcaaattcggcagcttcgtcttcggtcatttgtttggcttggtctgacatgtggggctccttgtctggtgctttatatggcgcccagtgtcgcgagggagttcccccctgtcatggcttttttgtcaaaagcggccataggcagaatcaatagcgctcctttaatagcggaaatgcccaccctggatctgcgccagcaactgcccggtgaccggcacataactgtccgaccccggcagccaggcatagaccgggtcattgccggccttgtccgggtcgaaggcttcctccttgagccgcaccttctggtatttgaaggtgccggtggtttccatcttcaccttgatccgcaggaacaacggcacggcatagtgcggcaactgaccatgagcgaactgcagcaactcgcgcatgtccagggcagccagcgattcgctcggggtgatggcgaccataccggcgcggccattggtgttttcgatttccacgccataggccacgacttcagcgatctgcgggtgttgcagcaggatgttttccacttcggtggtcgagacgttttctcccttccagcgataggtatcgcccaggcggtcgacaaactgtgcatggccgaagccgatgctgcgcaccaggtcgccggtattaaagtagcggtcgcccttctcgaacacatccgtgaggatcaccttgcggtttttctccgggtcggtgtaaccgtcatagggagacttttcatcgatcctggccagcaacaagccctgcccgccggtcttcactttgtgcatgaagccatcgctgccacggatcggctcaccgctgtcgtgggcgtagtccaccaacgcccagtgctgcaggcaaaagccgacggtgttgtcgaaattcaatatgttggtgaaaccgatattgccgtcgctggcggcgtacaactcgcagacatgctccacgccgtaacgcgccttgaactgtgcccacacaccggggcgcaggccattgccaaccatcttggtcacgcggtggtcacggtcgtttccggtggccggctgatcgagcagatagcggcacaattcgccgacataaccgagggtggtcgctttgaatttgcgcgcatcctcccagaactggctggcgctgaacttgcgccggatagcgaacccggacgcgccgacaatcgccgagccccagcagacgcagaggccggtggcgtgatacagcggcagggtgcaataaagaacatcctccggccccatgtccagcgcaatgctgccgaagctgaccgcggtcttggtccagcggccatgtttcatgatgccggccttgggcagcccggtggtgccggaggtatagatatagaagcaggggtcgttgaagaaaatctgcgcggtactcggcgggttgtccaccgggcatccggcgctggctgccatcaggtcacagtaaccgtcgggcagcgcattgacctgctggtccgcgacaaaccaggtccgttccacaggaatgctcacctgctcacgtaccgcgtcataagaagccactaattctgcaccggccacaatcgccaccgggttcaccaggttgaggctgtgcagcagcgccgcctgggtttgcgcggtattgagcatcgcgcagatgccgcccagcttggccacggccagtacgctcagcagcaactcgggacggttttcaataaagatcgccactacgtcgcccttgccgatgccttgggcttgcagatggtgggccatgcggttggcctgttggttggcttcgctgtagctgactacgcggtcgccgtacaacaaggccgtgccatgcgggttacgcagggtggcttgttcaaaatgccagcccaggccacagggctgcgcggggtcggtgacattggcggcccgcatgccgcgcaccacgcgtggcaaagcgcgaacaatggccggcaccttccgcagcatcatgccccaggtgatcatgtcgttttgcgcgtggctcatgggaacatcctttttcttattgtgcgtaaaccttgcagaaaagtacgtcaggccctcttcggctgtacacgcaggatttgaaaagttttgtatcccgataagcgagcgctgaaaaaaggaatttagccaggcagagggagtctttatgagtaatggcctgcatgctcgaccctgccaagcaacgcaaaatgcaggatgcatgatggccattcatgcaaattgcacgaattcgaaaatttagaatttttataaactattgatttataacgatatttatttaaatcactagctggcacaatcactgcacctatctctccatgcttgccaacttgagccaacggagctgatagacatgagcctgatccaagataaattcgcttcagtattctccaactacgatgtcaccacccagcctcgtccagatggcggcatcctgctgaccctgcgcaacagcgagggtaaacaggtcaagcgttcgatctcataccagcaattgcacactgccgaccagctgacatgggttatcagcgccattcgccgcgacctggcagaacaggccagcgagctgccgcagatttcgatgctgcaaagccagaaccgctttgccttgccgacctaccactcggcttaagctccagatacccaaaagggccgcgacgcctctagcgtcgcggccctttttcatgggttcaacacagcccttgtcggctggcttcgttgacggcctgtacccgattggtcacttccagcttgcagtagatattgcgcaggtggaacttcacggttgcttcggacgtggcgcgtatctggctgatctcccagacggtcttgccttccgaagcccagcgcaggatttccaactccgccggggtcagggccttgcccgctaggttcagacgtcgcctgattgcattgggcagcgaatacggcggtagatacgattccttggggccgctcattagatcctctcctttttctggctcatgccgcaccaccttcttcggattcctcctattgacaggtgacataaacattgatgccgcagagggttacataacgaatggtattaaggcgcaggcccgcgcataaacatccgggccttacagaagtttaagtttcttcccacagcaacttccaaccttcaggggttgtagtttttgataggtggggattagtcgtcgaggccggggaaacgactggcaatatcgtcctcggtgaactccggtatacattcttcagccgtactgcacaggcgcagcgtgacgaagtgcgggttctcacccatatcaatccagtgcgccataccggccgggatcaccagcaggtcgtttttctcacagcgcacggcgtatacgtaatcgcctatgtgcagggaaaacagcccctggccagcaatgatgaaccgcgcggtatcttcgctgtagcggcgctcagcaagaaaacccgcacgcacttcggccttctggagatgatcctccgtcaccttgagcacccgcgcatctgcgtagcccaaggcctgaatctgcgccttgtacgccgcaatcaattgcgcatctgtggcccccttctcgatggggacaggctgccaacgctcaaaacgcacgccgtgttcggccagggtcgcagcaatatcctcgtagtgggtgaggaccttgttcggggtgtccggtgaagcaacggagtagacggcgacatagctcattgaagggttccttggttctgctcgtgcaatcgaagaccgatgataagggcggcggccagggccgcgacgctcgcgatgctgaacgtcagggtcggccccaacaggttccagctgtagccggcatacagcgcacccagcgcaccgccggtaccggccagggcggcgtagagcgcctggccctggccttgttgccggtcaccaaaactgcgttgcacaaaggcaatcgaggccgcatgaaagctgccgaacgtggcggcgtgcatcacctgcgccagcaacagcacccagaaatactcggcaaacgaccctagcagcaaccagcgcagcgccgccaacaggaaactcgccagcagtacccgacgtaccgaaaagcgcgtgaggatgcggctcatgccgaggaacatcaacacttccgccacgacccccagggcccacagcatgccgatcacaccgcggctgtaacccaggtgttccaggtgcagcgtcagaaaggtgtaatacggaccgtggctcagttgcatcaatgccacgcaggcataaaacgccagcacgccggggctgcgcaattgcttgaggaagccgtcgcccaccagacgattgccgtgggtggtgggctgcgcattcggcacccacaggctggcgccgataatgcccgccatgatcaccacgaccaccaccgggtagatgtccaggctcagccagtcgaacaggcggcccatgatcaccacggtgaggataaacccgatggaaccccacaggcggatctggctgtagcgcgccgtctgcttttgcaggtgcgcaagggtgatcacttcaaactgcggcagtaccgcgtgccagaagaacgcatgcagcgccatgaccagggccagccaggcgtaggtgtggctgacgaagatcagcgaaaaactcgccagggtgcataccgcaccaaaacgcacgatggccaggcgccggccggtgtaatcgcccagccagccccacaggttgggcgccacgcagcgcatcagcatgggaatggccaccagctcgccgatgcgcgcgctggagaaccccaggtgatcgaagtacagcgccaggaacggcgcagtcgcccccaggagggcgaagtagaacaggtagaagctggagaggcgccagtatgggagagatgaggtcatgctagatggggctgcttcgcagcccagcgcgagcaagctcgctcaccacagtcacagctggcccagcaccggcgtactcacgcgcacatcggcgttttgcccgcgattgcgcaacaggtggtccatcaacacgatggccatcatcgcttcggcgatcggcgtggcgcggatgccgacgcacgggtcgtggcggcctttggtgatcacatccaccgggttgccgtgcacatcgatggaacggcccggcgtggtgatgctcgacgtggccttgagcgccaggtgcgccacgatcggctggcccgaggaaataccgccgaggatgccgcccgcgttgttgctgaggaaaccttgcggggtcagttcgtcgcggtgctcggtgccacgctgggacacacaggcaaaaccggcgccgatttcaacgcctttgaccgcgttgatgctcatcagcgcatgggcgagttccgcatccaggcggtcgaagatcggttcgcccaggcccggcttcacgccctcggccaccacggtgatcctggcgccgacggaatcctggtcgcggcgcaactggtccatataggcttccagttccggcaccttgtccgggtccgggctgaagaaggcgttgccctcgacgctgtcccaggtcttgaacgggatttcaatcgggcccagttggctcatgtagccacggatcacgatgccctgggtggccaggtatttcttggcgatggcaccggcggccacacgcatggcggtttcgcgggcagaactgcggccgccgccacggtagtcgcgctcgccgtatttgtggtggtaggtgtagtcggcgtgagccgggcggaacaggtccttgatcgccgagtagtccttggacttctggtcggtgttgcggatcagcaggccgatggagcagccggtggtgcggccttcgaacaccccggagaggatctcgacttcgtcgggctcctggcgctgggtggtgtggcggctggtgccgggcttgcggcggtcgaggtcacgctgcaggtcttccagggacagctcgaggcctggcgggcagccgtcgacaatggcgaccaacgccgggccatggctttcgcccgcggtggtgacagtgaacagcttgccgaaggtattgccggacatgcagggcgctccgtgaaatcagttgaatcaagtcaaccgtaataacttaaggcggccagtatacgcaggctaaccgagtagttcatcctcgaaaccttaccggtagaccttggtccaaccggcaccttcctcatgatggcgcgatgatgctgcgagttctgcttttgaccctcaccctgttttccagtgttggcttcgccgcctcccctgtcgtgctgcaaaggcccatcagcctggacaccggcagtggcgagctgtttggctcactcttgttgcccaaatccgataagccagtcccggttgtactgatcatccctggctccggccctaccgaccgcaacggcaacagtgccgacggcgcgcgcaacgacagtctcaagcgcctggcctgggtgctggcgcggcacaacattgccagcgtgcgctacgacaagcgcggcgtcgcggccagcctggcggccacgccggatgagcgcaacctgaccctggatgcctacgtggccgatgccgtggcctggggcaagctgctcaaggccgacacacgcctgggcccgttgattgtgctgggtcacagcgaaggtgccttggtcgcggctctcgccgcgccgcaactggacccggccggcgtcatttcgttgtccggcagcgcacgcccggtggaccaggtgatccgccagcagttggccgatcacctgccccctgccctgttgctgcgcagcaacgagatcctcgatcacctcaaggccggccaggtggatgctgatgtacccggcccgctggaaggcattttccgccccagtgtgcagccgtacctgatcagcctgttccgtgccgacccttcggccgcgttcgcccagttgcgcatgcccgcgctgatcatccagggcaccaacgatatccaggtgggtgtgggcgacgcccagcaattgaaaaaggccaagcccgacgcacagctggcggtgatcgaaggcatgaaccacgtgatgcgcatcgtgcccaacgacgtgaagcagcaattggcctcgtacaacgatccgcaactgccccttgccgccgagctgggcagccgcgtcgtgcgctttatcgacggacttcaaccccgttaagcgacaatttgtctccagtcctgggaaaaacggccgataagccctgggtcgacagcaaaaagactgtcggctcgctgggcttggacaggatcgcgccgcatgacaaccactgaagcaacaccggaatccaccgccgataccccggctgaaaaaaccgaggccgtcgacgcggcgcccttgccgtgggcggaggtccaggccgagcatttcaagatgctgcgcctggcgcccctggccaccgaccgcgccaccggcgtgcgaccgttgcgcttcgtgcagtttggctacgccgagcgcaatgacaaacaccacagcctgctgcgcatggtgatccagctgccagggcagcgcgtgcgccgtgagcagaaccacctggacatctgggtcgaccacgacaagcaccgcgtgcacttcggcccgggcaacagcctggaaatcgaaccggccaaccggggtatcggtcgcttcctggtggcccagggcgccgcgtgggcgaagaagaagtggtcacactaccgcgtcgacggcgtcgacctggccaacaaagatgcgttgaacgaggccacccgcctacgccgtgatcacttcctgcgcatccagggctttgatgtggcctacgccgatgtgcagcacctcaaaggtaatgtgcagccgggcaaggtcggcgatgtgctggacagttggaacaccgagaaggtgcagttcgtggagattctcgaagccgcgcagatgctgcaacaggccgagcagaacctggcggagcaggaagtgaaactgcgcaaggaagaggaaaaggtcaccaagttcaagcgtgaggacagcgggttgcgctttaccatcacctgcctggtggcgtttacagtgtttcaggcggggttgttgatctggattgccacccaccgctgaaatgagtctatgccttgaaataaggtctgaatgtgggagggggcttgcccccgatagctgagtgtcagtatttggagtagctgactgatccaccgccatcgggggcaagccccctcccacattggccctattcgttcagtaaggtgggttaaacgcgggcggcaaacaccgcctgatgttgacggcattgctcagccgtcaacatgaacaccccatgcccaccgcgctggaagtccagccaggcgaagtccacttccgggtacaacgcctcgacgtgcacctggctgttgcccacttccacgatcagcaagcccttctcggtcaagtggtctgccgcttcggccagcatgcgccgtaccaggttcaagccatcgtcaccacaggccaggcccagcgccggttcgtgttggtactcatccggcatgtcggcgaaatcttcggcatccacatacggcgggttcgacacgatcaggtcaaaacgctggcccggcaggccgtcgaaaccgtcaccctgcacggtgtagacgcgctcatcgacgccatggcgctcgatattctggttggccacttccaaggcttcaaaggacaggtcgcccagcaccacttcggcgtcctgaaactcgtaggcgcaggcaataccgatgcagccggagccggtgcacaggtcgaggatgcgggcggggggctgggccagccagggttcgaagcggttttcgatcagctcgccaatcggcgaacgcgggatcagcacgcgctcgtcgacaatgaacgacatgccgcagaaccacgcctcattcaataggtacgcggtgggtacgcgctcatggatgcgccgatgcagcaaacgttgcacatgggagacttcctcttcctccagattgcagtctagataactgtcggcaatttcccatggcaggttcaaggcgccgagcactaattggcgggcttcgtcccaggcattgtcggtgccatgcccgaaaaacaggtcttccccatggaaacggctgacagcccaacgaatatggtcgcgcaacgtgcgcaggcgggatgtgatcacggggacaagctcctggaaaaaacgactggcgattctaacagccttcacctgtaccgacgatgtacgaaaacctgcgcccatccgtcggatttcatccaaattgccatcattgcgttaaacaggcccacctcttgacatggctgcacgtcaacaacggcgtaccttacgatggtagcgattcacagaaccgctcagccagtggacaatgtcgcaaaagcccccctcacaggagccccagaatgtccgttccaaagacgatgtttcaactcagcggtcgtggttacgcagcagcgaacctcagccatgcgaccctcgtgatcatcgacgcccagaaggaatacctcagcggcccgctcgccctctcgggcatggacgcggccgttggtaacatcaagcaactggtcgccgcagcgcgcaacgccgggcgcccgatcgtccatgtgcgtcacctgggcaccgttggcggcttgttcgaccctcaaggcgaacggggtgagttcatcccgggcctcgagcctgagggcgacgaaaccatcatcggcaaactgctgcccagcgcatttcacggcaccggcctggaaaaacacctgcaggacctcggttccctggatctgattgtctgcggtttcatgagccactccagcgtcagcaccaccgtgcgtgccgccaagaacctgggctttcgctgcaccctggtggaagacgcctgcgccacccgcgacctgccttacaaaggcggcatcctcagcgccgagcacgtacagcagaccgaaatggccatcatggccgacaacttcgccaccctggcgttgaccaaagatctgatctgatcgaccttctgatgagcggtgcggcaatttttattgccccgctcatccgcaaagccttttcatttggcgcatttacccctcgtcccggaacaacctgtgtattgtccggtcgaagggccgataccctggaggaaaggtcggaatgaagatatccgatggttttgatgctcgtcgcttgcgccccaagggcccgagcaactggcgtctgcgcctggtggccggcatcgccgcgctgctggcgatcgtaggtctgctgttggccggcgctggtggtgccggtctgtctggtcactcgccggcccttggcgagctgaatgccagccctggtggctcggctatcctgctggggatcgggctgctggtactgtggctgggcgtatggttgtggcggcgcagccgtcggaaaatgcgccagccgttgtcgcttaatatcgcttcgcacctgatgaaaaaacacgactgatggcgcttggatagcgtttcctgcgccccggccgccgcgatttaggtaaactgcccgcccttcgcggaggctgacatgcaagacgacgatttttccctgttcaaaaacgagctgcgcggcgtcaagccgatcaagcacgaccgcgccgacaccggcaaacccaaggccgaccgcgcgcagatcgccaagctgcgccaggccgcgaccgtgcgaaccgatgccaccaccgtggacggcctgtcggaccagttcgtgatcgacgtcggccccgaagacgagctgatgtgggcccgcgacggtgtgcaggaaagccagatgcgcaagctcaagatcggccagatcccgttcgaaggcagcctcgacctgcacggcatgaccgtggaaaaagcccgggagaccctgtgggcctttctcgccgaagccaccaagttcgaaatccgctgcgtgcgcgtcacccatggcaaggccgtgcggctggacggcaagcggccgatgatcaagagccacgtcaacacctggctgcgccagcatgcccaggtactcggctttacctcgtgccaggctcgtcacggcggcgcgggggcggtgtatgtgatgctcaagcggaccatgatggaagggcgcgacgaataacaagtgccatcgtcaggcttgcagcgatgtgcccgccaccgtaaccttgcgctttgcgaaaatcccacaggtagtttcatgtccctggaacagaattacaccgcgatcctcggccaactcggcgaggacgtttcccgcgagggcctgctcgacacgccaaagcgtgccgccaaggcgatgcagtacctctgccgcggctatgagcagacactggaagaagtcaccaacggtgccttgttcagctccgacaacagcgaaatggtgctggtcaaggacatcgagttgtactcgctgtgcgaacaccacctgctgccgttcatcggcaaggcccatgtcgcgtatatcccgagcggcaaagtgctgggcctgtccaaggtcgcgcggattgtcgacatgtatgcgcgccgcctgcagatccaggagaacctcagccgccagatcgccgatgcggtgatgcaagtcaccggcgccctgggcgtggccgtggtgatcgaggccaagcacatgtgcatgatgatgcgtggcgtggagaaacagaattcttcgatgatcacttcggtgatgctgggtgagttccgcgaaaacgcggcgacccgcagcgaattcctcagcctgatcaagtaacaggctgcgtaggaaaagaccggcgctcatcgccggttttttttcgcccgcagaattcaggtaagctgccgcccctcagttatgggcaagaggtttacaccatgttggtcaaagcacttcgagtcggcctcggccagatcatcatcgcgggcgacttcctgacccgtccccgcaaaaaacagcgccccgccgaacagcaggcgcaggtgaatgcagcggccaaggaactgaccctgtatcagttccacgcctgcccgttctgcgtgaagacccgtcgcaccctgcgccgcctgaatgtgccggtggcgttgaaggacgcgaagaacaacgcgcaggaccgccagaccctgctggagcaaggcggcaagatcaaagtgccgtgcctgcgtattgaagagaatggccagaccacctggatgtatgactccaaggtgatcatcgactacctcgacaagcgtttcgctgcggtctgacagacactggataaccaatgtgggagtgggcttgcccactcccacatttagttcagtattggcaaatcaatgtccagcagcgcggagcccaggcacttgccatgggcatccagcgccagcgagcgggtgacaccaccacgcagaatgcccggcagaacgaagttcagtgcctgcacattcgccagctcatagcgccgcaccggtgcggcgcctggctccagttggtcgacaaagaacgcggccacgcgctcaaccgtcagctgtgcgcagagcaatgggtaatcctcggcacgataggcaatgatcgaaatgttcgacgtgtcgcccttatccccggtacgggaatgggccagtgtgtgcagcttcatgcttcgatcctcggtttgaccgcatcacgcggcagcagcaacgacgccaccgccaccacctgccgcacgctcttgctcgcgccgccgccaccagacgggccgttggtgtaaagggtttccacttcgttgccgacgcgcaccgcttcgctgcgctcttcacaacgagccgccacgcgcaggcgcacttcccagggctccaccgtgctgcgcgggccgtgcagcgagtccatgccgatcaattcggcacgcacgtcctgcatcttcacccccatcaactcaaggcgcttgagcacgacatcccgcgccagctgtgcccgagcgacagcaccagggccaccgtaggacatctgcccttcaccgatccatccgtccagatagccaacactcaccttcaactgtgcgggacgcgagcgccccccagcaccttgggcacgaacgcgatccgcgccctcctcgacaaagcccacctgggaaaagtcggctgtaacatccggcgtcagataggccgcagggtcatgcacttcgtagatcagttgctcggtgcaggtggcacagctgacccgaccaccggagccggtgaccttggtgatcacggcttcaccgtcggcatcaatctcggccagcgggaaacccaggcgcgccaggtcatccacatccttgaaacccggatcggcaaaatacccaccgctgacttgcccggcacattcgagcagatgccccaccaaggtgccgcgccccaggcgcagccaatcgtccgctgcccagccgaactcaaacatctgcggtgccaggaacagcgaggggtcggccacgcgcccggtgatcaccacgtccgcatcggcgtgcaatgcctgcagaatgccgtcgacgcccaggtaggcattcgctgagatcaaccgttcacccaaagagccgacggtctggccgttatccagcaaaaactcgggctgcaacatcgtcaacacgtcgtcgcccaccacagcgagtaccttgagatccaggcccaactcaacagcaattcgccgcacttcggccgccgccgagactggattggccgcgcccatattggtgatcacccgcaggcgacggcgcccggtctgcacacccacaaacggcagcacccggcgcatgcgctcactcaacagcggatcgtaaccgccttgcggatcgctgatacgcgcctgttgcgccaaagcgatggtgcgttcagccaggcattcgaataccaggtaatccaggtcgccgtgttcggccaactcgaccgcaggttcgatacggtcgccggaatagccggcaccggaaccgatgcgcaaggttttcatctcaaatcactcccaggagcaacgcggtcagggtcatcaacaccgacgcggcaaacagaaacggaatggtgaagcgctggtgatcggccagttcgatcttgcacaggcccaccaacaggaaggtcgcaggggtcagtgggctgaccgggaaaccggtggtgtgcacccccagcaacgaggcctgggccacttgcagcgggtcgacgcccagggccttgccgacttcagcgatcaccggcatcacgccgaaatagtaggaatcggggtcgaacagcatgcttaacggcatggaaataaaacccaccaccgccggaatcaacttgccgtgacccgccggaatctgcgccaccgccacttcggcgatggccttgagcatgccggtgccttgcatgatcccggtgaacaccccggcggccaacaggatactggccatggtcagggcggtcttggcatgggcatcgatgcgggcacgctgggcatccacgttcgggtagttgatgcacaacgccactacggtgccgagcatgaacatcaccaccgggtcgacccagccggcaatcatcaccaccatcaccagcacggtgaggatcaggttgacccagaacaggcgcgggcgacgcagcttgatgtcgtcgtcgctgagcacccgttgcggcaccgcatccaccgtggagccggcgccgagacccaggcgtttttcttcgcgacggcccagccaccaggcacaggcaaacacgaagatcaggccgacgatctgcaccgggatcagcggctggaacaggtccgccaccggcacgtgcagggccgctgacgagcgcagcaccggcccggtccacggcaggaagttgacaccggcggccatcgcacagacgcaggcgaggatgcgtttatcgatgcccagccgcgtatacagcggcaacatcgccggcaccgtcaccaggaacgtcaccgcgccggagccgtccaggtgcaccaacagcgcaagggtcgcggtgcctacaacaatgcgtgtaggacgcgtccctaccgtgcgcaggatgcgatcaataatggggtcaagcatgccggcatcggtcatgatcccgaaaaacagaatcgcaaagacgaacatgccgaccacgggggcgacgttcttgatcccggtgatgatgaaggcgctggtttgcaggccgaacccgccgagcagtgcggcaatgatcggcaaggcgatcagggccaccagcggcgagagacgtttgctcatgacggcagcgagcaggcacaggatggtgatgacacccagggtagcgagcatgggttactccagagcggcctttttggccggttattgttttccctggagtattggaagcaggttagtctttgtaaattggaatattcacccgctagtgttcggaaaaacaaaatgaagaacagtatccaacacattcaggcgtttctggcggtggcacgtactggcagcttcaccaaggcggccaatgagctgcatctgtcgccttctgcgctgacggtgcaggtgcaacaactggaagactggctcggcgtcgccttgctcgaccgcagcccgcgccacgtcagcgtcaccgtcgccggccaggaggcccgcgggccgatggaaaaactgttgctggacctggacaacatcgtcagcgggtcccgcgacctggcggcgttgcgccgaggcgtggtgaccatcgccgccctgccctcggtctgtgccggcagcctgccgccggtgctgcgcctgtttcgcgagcgttttgcaggaatcgaagtgcgcctgcatgacctggtcgcccatcgcattcatgcccaggtgcgttccggtgaggtggatttcggcattggcgtgcgcgcacggctcagccatgggctggaattcgtgccggtgctgaacgatcgcctgtgtgcgttcgtaccggtggatcaccccctcacccgccatcgcaaactgaccctggaacaactggcggaccagccgatcatcctcactggccgcgacagcagcgtgcgtgagcaagtggatgcgcttttcgatgagacacgcctgacgatgaacgcgggcatggaagccaactacatgtcgacggtattggcgctggtgcgccaggggctggggatcagtgtgctgccggaatcggcggcggacagcctggcggggttgaaacgcatccccatcgatcatcccggggtgaaccgcgagatcgggttgatcagtcgcagcgggatgggcctaagccctgctgcacagcgttgtttcgacttgctgaacgaacaactgaatgtgggaggggcttgcccccgatagcagagtgtcaatcacacataagttgactgatacaccgcaatcgggggcaagccccctcccacacgtttaaccgagcataggcacatgcttgggatggctggccacacgctgcaaccacgcctgcaccgccggataagcctccagctcaaaaccaccctcattcgccacatgggtataggcatacaaggccacatccgcgatggagaactgctcgcccaccaggtacggcgtcagttgcagttggcgttccatgaccttgagcgccttgtaaccgcctttgtgcagcttcttgtattcctccaggcggtcttcgggcaggcccaggtaaaactggataaaccgcgccaccgcaatgtacggctcatggctgtactgctcgaagaactgccactgcaacacctgggtgcgcagacgcggttcgctgggcaggaactcgctgccatcggcgaggaagttgaggatcgcgttggattcccacaggcaggtgccgtcttccagctccagcacggggatcttgccgttggggttcttcgccaggaactcggcggtctgggtgtcacccttgaggatgtccacatcgatccattggtagggaatgcccagcaggctgagcatcaatttgaccttgtagcagttgcccgacttgtaatcgccataaaccttgtacatggggctccccttatgccgcttgcgcgtgctgtgcttgacggaccaccgcggccaggcgcttgagaccttcatccaaacgggccgggtcgatatggctgaaattgagccgcaacgagccaagatgttggtccggctcggaaaagaacggttcaccgggcatgaacgcaacgttctggtcgagcgcttgagccaacaaggtgcgggtgtcgagcggctgtttcaaggtcagccagaagaataatccgccctggggcacctgccagtcggccagctcggcgaattgacgctccagcgccgactggaaggcatcgcggcgctcgcgataaaagctgcgcagttgcgccaggtgctgctggtatttttccgtgccgatccactgcatcgcctgccattggccgacgcggttggtgtgcaggtccgccgattgcttgagcttgagcaggtgcgggaacaggtccgggctggcgatcagatagcccacgcgcaggcccggcaacagggtcttggacacggtgccggtgtagatccagctggcttttttcaggcgcccgacgatgggtttggcgctgccgccgtcgaaggtcagttcgcggtagggttcgtcttcgatcagggtcacgccgaattcgtcgagcaaggcggcgacggcttcgcgcttggcctcgctgtagcgcacggccgaggggttctggaacgttgggatcaagtagatgaaggccgggcgatggcgctcaagattggcacgcaacgcgttcaggtccggaccatcggcttccagttgcacggtgaggcaatcggcgccgaacagttggaagatctgcaacgcggccaggtaggtaggcccttccaacaggatctgcgtgcccttgtcgatgtacagcttggccgccaggtccagggtttgttgggaaccgctgaccaccaacacctggctggcctggcacggtacacccagggcacgcgcctcggcggcgagcagttcgcgcagctgcggttcgccttcgctcatgccgtattggccgatgttcagcggcatgtcgtcccagttcaaggcaggcaacatggcttcggccggcaggcctccggcgaacgacatcacttccggacgctgggccgccgcgaggatttcacggatcagggagcttttgaggcgcgtaacacgttcagagaaggccatggggtcaccggtagcgaagactgtgggaaatacgtcaaactggttgaccgaaattacgacgactcgcacggatacgtcaatatgcttgaccttaaaaaccccaccgcccagcaggccgccatggaagcgttcttcttcggctaccaagcgtttaccgccaaggccgacgaaatgctcgagcgccgtgggctgagccgggtgcaccagcgcattgtgtttttcatcgcgcgctacccggcgttgagcgtgaaggaactgctggagttgctcggtgtgagcaagcaggcattgaacatcccgctgcggcaattgcaggagatgcacctggtcaacagcgtcgcgtccgagacagacaagcgcaaacgcctgctggagttgaccgaagaaggcctgcgtttcgaacagtcactgcgccgcgaacaggtgaaattgctgcaacgtgccttcagtgacgcgggcgaagacgcggtagttggatggctggcggtgaatcaggcgctcgccaatcaaccctgatgcggtggtgacgctcctggggccgctacgcgccccaacgcggggcaagcccactcaccacgcaatcgtatggttgcctttcatctatttcgtgcagcaaatagaaaacattatttgctttatttgtatacaaaagcataattcgcttcgtgcgagttcctgacctattggtcaacaaacccgccagtacctctcagcgcttcggcgctgaccataacaataaaatgcttgaggagtactcgctgtggatagccgcaaatccgaagcctcgacgctggaccttgccccctcaccgaacggctggctggaacgcctgttcaaactgcgcttgcatggcaccacagtgaagaccgagctgatcgccggcctcaccaccttcatcaccatggcctacatcatcttcgtcaaccccaacatcatggccgatgcgggcatcgatcacggtgcggcgttcgtcgccacctgcatcgccgccgcactcggttgcctgttgatgggcctgtacgccaactggccggtgggcctggcgccaggcatgggtttgaatgcatttttcacctacaccgtggtcggcaccatgggctacacctggcagaccgcgctcggcgccgtgtttatctccggcgtgctgttcatgtttctgactctgtcgcgggtacgtgaatggctgctcaacagcatccccgtgagcctgcgccacgccatgggggccggcgtcggcctgttcctcggggtgatcggcctgaagaccgccggcatcatcgtcgaaagcccggcgaccttgatcaagctcggttcgctgcatgagccggcgccattgctggcggcggtgtgcttcctgctgatcgccatcctcagctaccaccgtgtgtttggtgcgatcctgatcagcatcatcgccgtgacactggccggctggggcctggggctggtgcactacaacggttttatctccacaccgccgagcctggcgccgacctggatggcgatggatgtggcaggtgtattcaatatcagcatgatcagcgtggtatttgcttttctttttgtacacatgttcgacaccgcaggtacactgatgggcgtcgcgcaacgagccgggctagtcaatgccgatggcaagatcgacaacctgtcccgcgcattgaaggccgacagtgcctccagcgtgttcggtgccatggtcggcgtgccgccggtgaccagctacgtggaaagtgctgcgggcgtagccgcaggtggccgtaccgggttgaccgccgtgaccgtcggcgtgctgtttgtggccgcgatgttttttgcaccgctggccgggatgattccagcctatgccaccgcgggtgcgctgatttacgtggcaatgctgatgatggcgagcatggcccatatcaattgggatgaagccaccgacagcatcccggcgattgtcaccgcgatcatgatgccgctgacattctcggtcgccgatgggattgccctggggtttatcacctacgtggcgctcaaggccggtacgggcaagtaccgcgagatttccgtcagcctgtgggtgctgtgcgcgattttcatcgcgaaattcatatttctataagaggtgttaggcatgagtctggaaacctggttgttgttcagtggcgcggcattggtggtgatcctgatccccgggccgctgtcgttgttgatgatcagcaacagcctcaactatggcttgcgccgctcctaccccgcatttctcggtggcgtaagcgcctcgatctgcctgctcagcgcttcggcgctcggcctgggtgccctgctgctggcctcggaacacctattcagcgcgctgaagatcgtcggcgcgttgtacctgttttacctcgcctggcagagttggcagcagtcgcgccagccaagccagggcgccgacgttccacaggccgcgccgaccccacgctttcgcgccttgttcgggcgggcgtttgtgctgggcgccagcaaccccaaggacatcctgttctttgccgcgttcctgccgcagtttctcaacagccagcagccgttcctggcgcagttgctgatcatgatcgccacctggaccgtgctcgacctgctgtgcaagctggcctacggcttgagtgcccacggcgctgcgcgctacctgcgcagtggcaagggccagggctggttcaaccggatcagcgccgggctgttcggtggcgcaggcgcgctgtcgttgctcaagagctgaccccgccgaacttgacgaaaaacaccgtcgggttggaacgcgatgtccactggataccggcaatgatcttgaccaggcggttctgattcaatgcccgactgatctcgggcatatgctccgaataggtacgcgccacactgcgccgcctgaaccattcgtcagtcaattgcacgctggtggcggaccgcaggttaacggtgctgttcttcacccagcgcgtgagcacgtagtacctggcgttggatttggggtgcgtgcagaagtaatccaccgagtactgcccgcccatgcgtttttcgatcgagtggatgacaaacccttgttgttccagcatccgggcaatcaccgcctgcaccacctgggccctggcactggcgttttcgcgggtgctcacgcgcaaggagggatcaaggggcgctggcagggtgaagtccatgcgcgtaaaccccggtgaacggccttcatagccaatgtagaaagccaggcgccgtcggctgtaggtcggacgcaacattttcagcaggtcatcggtgtggcccacggcaccgggggcgagccagtcatccagggtggcgcggagggtcaacagatggctggcggtcacctcacggccggtgtcggccaactcaatcaagcgctcacaggcggagcgccggctgagttccctcatgcggggaaacactcggcccatggtgttttccagcggctccaggaacagcaccggccgcgccttccagaggccatcggcgcccagcgtcgcaggaatcggctgctcactgaagccggcgcccaaccagaagtgaatgtcggtggccgcttgcggagccagcgcccgattacgggtgagaaagataatgctctggaacgacgaattggtcccctcgggcagcaaccggaacaaacgcccgtcttggcgcagcacatcgaaggcccgctccccctccccgcccgacacgcggaagatcccgcgctcgggcaacaggtctgtcagcacccatcgcgaatcgaacgcccacccctgccccgcaccgggcagatgggcggcgcggcccacgtgttcctgcagcatcgcatgagaaggcggcgaccactcctgggcgctgggggttgtagcccacggccgccacatctcggtactgggtcccggctgcggctggggtggcggggcatcggcgccaagcagccattccccgggttcctcgatgtgcagaatcagctcgttttgcacatcgtcctgcgggtgcttgagacgcagcacctgttcatcctggcgtcgatagaccgggtattgatgggtatcgtcgagcacaaattgctcgccacccttgacgtaagtgccccgattacccggcccctgcaactcgatggctgcgcttggcggcaggtccttgcgaaaccgttccagcgccttggccggcagggtcgtcgacggtttgagcgcagacagcccgccgccgaccaacccatgacgacggtgcagccggcccagggcaccgcgcatcgacgcgcgcgcggcggccacgcctgtcacccgcgcaccttttggcccgggaatgaacgcggtcagcacatccacaaagcccagcagcgtgacaaacaccaagtcaacggcgtcactgggatggcggctgtgatgaaagcgcctggccgccaacagaatctcgtaaaggctgacccccaggccgatcaccggtacgaacgacagcaacccacgcagcgtagccgcgtgttgctcgcccaagcgatcttgccggtaggcctccaatgttctggccgatacggcgcgcccctgtgcgcggtgctggatttcgagcatccgcgcgtgcgccaacagtgccaacgtatgactggcgggggttgcactgaagtcgagccaggcgttcggggcggcggcgatctgctcgttgatctgcgcctggatatcctccacggccaccgacggcacgcggtgcttgaccttgaacgagcgtatgaaccgggcgatggcctcgaccgtttccagcacatagaacccacgcaccggagcaaacaccagtctggttccaccggtagccaccatcgcccccccgctgccgacgacggggtaactggcgatggcctgcgtctcccaccccggtgccacctgatgggccagggctttcacattggccggggtcgcccaagcctggttcaaagcggcgacagcctgctcccggctcgtgtactcggcgatggccgggccatccactgcggcaggccagtacaccagccacaaccctgtggcttcgtcgtgggtcaccagcaccccggcgatatgccggtcgtgttccagggtatgcccgcacaggcgcacgaagtgcaatcgcaggcgatggccgttgccgttcagatcggccaccgcctgcgccgccatcagggtgttgaacacactctgggccttggcactcaggccctgccttgccgccgaaaacccatgcatacgcgcctgctggcgcagtacccggtcaatcagtccaccaggcaacgttgggggcgcgcaagcgggcggataaaacacttgctggatcaacgtgtcatagcgcccgccgatatccagggctgccagggtcttgatcaagtaacggctattcaagcgctgctgccactgcggcgccaggtagcgcgcgcggttcaagcgccactcggtccagggcgcctgggcatccagattgtgcagggccaactgcaacaggctgaatgtagtgcgttgcggactgacgactttcttgatatcccgctcgcccaccccgcactggctggtccacccgcagaagtaggcgctgacgtcatcgggcatatcgagcaagggctgatcgatatccacctccgggtacaacccatccagcttcaattgagcgatcagcagcttacgtgcgaacgcctccaactccggcaattcacgccagagcttggcttcgaatgcctgggcactgctcaagtaatgcagctgtaatcgtcggtaggcattgcgctgatcggcctgcgcctggcccagccatgccggcagtttattcgcctgggcggcggcgaaccgcagcagctccaggttggccatggcctcggtcaaggcgtcatgcgccggcacctgtaggtgctcgcgcatctcggcggccaacagcatccggatcagcgcccggtcgcggacttcactgaaaagccgcaagccctggtccagtccctggtcgagcctggcgtagtggttgatcagttcagtgagcccatggtgcagcacatgttcctcaagcacttcgtacgtcaccgtgatgtcagacgcagtcttcagcgcctggcgccgatcacgccccacgcactgccagaggggcgagccgtcgcgactgcacaggctaacccgcaggcgctcggatagcgtctccaggtcgtcgaatgcagccagcccgccgaagcgcccggccacacacagcagcactggctgcgtccgcaccggggtggcgtgggcctgtttagtcgtcactacgaacgcccccagcatcccctcgccgcccaacagcacccgcagcacgcaggtatcgctgccgttgcgatcgctggcatggggcttgttcaacacttcgaccaggcgctgcaagggcgcctcggccatcagtttcaaatgctgcagccgttgcacctcctgcaacaacgcctcgcgctgggcgatcaacaacaaggtggtacggttgcgcgtgtcgtctgggtgttccagccagaatgccgggctcagcaggcgctcatctgccccgagtgacagggcctgcaccgcatcagtctgtgcttgccattgcccattgagcgtgaccaatgcgtcataggccgtgctctcccggctcgggtcctgtgggtcgagcagcgtcatgaggcgcttttcgtagcgctccacctgctgttcgcggctgcgcaaggccagtccggacggcagctggccgaggatgatttctgccgcacgccgcgttgcatcccaacccaacaaggtccccagggaagcgcccaggtgctccgcgatcgccagtcggtcccggcctttttcgataaaccgcaggaagcgcgccgtgtcacgccccagtgaagccggcgccgctaacgtcgcgtgattgatcgacaacgcgcacgccagctcgttgtcccattgcgcatcaagcacggcgattgcactgtgctgcaaggcatcgccgctcagcgcagcgccacgcgccaactgcgtctcgccgcgacagacttcgtggcgacggcgtagcggcaagcactgccacaagacactgaacaacgcgccgttcaacaggctcgccaaaccgcgttgcacctgttcccaagcactgaactcatagaatgcgcgggccatccctggcagatagatcacgtggggcgcctgctgcgccgcgccctcacggtacaagtgcagggcgccgggaatggccagcgccgtctgaaacgtgccgggccacagtactgtgccgacgcgcacgccagcccaatcgccgccagcgcgctggcgtgcctcttcggaaggcgcatccgccaactgctgcaccaacgcccaacccgcatccgacagttcatccaactggtgcgccaggaagcccgcgtcgatgaacaaacgcttgcgcaattgcacccaacgcgcctggcgcgtcaaccacgagccgtacgccaaatactgccagtattcacgtacctggttgtcgagccgagccatcaaccccagccccttgacccgctccagcgcctgccgggcggtaaaaggcagtttgcgcgcagggtcgtccttgaggctcagcgcggtatactggttaaggttgatcggcaaggacggatcgctgaacaacgccagcgcgcgctcggtcagactgtcgactttctgcgcgggacgtggcggcaggggctcggtgaacagcagggtgtccggatccaggccaaaggcttcctgcaacgcgaaacgaatcacccgcaacagccgtggcgccctgcctatcagacgcttgagcgcctttgaggattcgatacagcgcgtgttcacgaggtgccattggttgatcagccggctgggttgggcggatgcgttgaggcggcgcgtcagcaagcggcgaacggcttgatcacgggcctcactggcctgaatgggattgtcgagatcaaagggttcggcggtgacagtgtccggtgccgagactacggggttgaggggatcagagctcatgacggcgtcttcttgtacgaaagacgccgagcctaggcctcatccctctaaggtgtgcgccacataattgaacgggcgggcgggcaaatgccaggcaaaaaaaagcccgcagtgtgcgcgggcgaaaccaacgaagagctttgggggtgtgaagcgaggtgacgctcagctaccgcgataggtggagtagctgtagggcgaaatcagtagcgggacatggtagtgatcctgctcggcgctgatgccgaagcgcagcaccaccacatcaaggaaggccggctccggcagttgcacgccgcgggcgcgatagtaatcaccggcgctgaactgcaattggtacacgccgctgcggtagtcgtcaccttgcaacagcggtgcgtcgcagcggccgtcgctgttggtctgcgcggtggccaccagttccagctgcacgccttcgacgcggtacagctcaaccttgattgcgctgccggggcagccgtgtgcggcgtccaatacgtgtgtggtcaagcgtcccatggcgtctgcgcgcctcctgtggtcagtagaaaagtgatccgcactttttcagggcatcgaaaaagccggtgatgatcgattaagacactttttaaaaaaattgtacacaataaaaatcacaaactctcagatcagcctactgccattgctcaacagggcaatctgcgcgttatccttgcttttaaaagaccttttgtccattagctgaccaaccaggcaagtttcttgctacacctctggtctagcgctacgccgaaaaaatgcagaaatgtaggcttacaaagtgcgcgataagttgtatacaatcactcatcgctactacgacgaacaagaaggaagactgcagtgagcgctgactacccacgcgacctgatcggttacggcagtaaccctcctcacccccactggccgggcaaggcgcgcattgcgctgtctttcgtactcaattacgaagaaggcggcgagcgcaatatcctgcacggcgacaaagaatccgaagcgttcctttcggaaatggtctcggcccagccgctgcaaggcgcgcgcaacatgagcatggagtcgctgtacgaatacggcagccgtgccggcgtgtggcgcatcctcaagctgttcaaggaattcgacatcccgctgaccatcttcgccgtggccatggccgcacaacgccatccggatgtgatccgcgccatggtcgacgccggccatgagatctgcagccacggctaccgctggatcgactaccaatatatggacgaggcccaggagcgcgagcacatgctcgaagccatccgcatcctcaccgaacttaccggcgaacgccccctgggctggtacaccgggcgcaccggccccaacacccggcggctggtgatggaggaaggcggcttcctctatgactgcgacacctacgacgacgacttgccctactgggaacccaacaaccccaccggcaagccgcacctggtgatcccctacaccctggacaccaatgacatgcgcttcacccaggttcagggtttcaacaagggcgatgactttttcgagtacctcaaagacgccttcgacgtgctctacgccgaaggggccgaggcgccgaaaatgctttccatcggcctgcactgccgcctgatcggccgcccggcgcgcctggcgtcgctgaagcgctttatcgaatacgtcaaaggccatgagcaggtgtggttcactcgccgcgtcgacattgcccgccactggcaggaaacccacccctacacgggagcggccaaatgactgcgttccacagcctgaaaccctcaaccctgagccgcgatgcgtttgtcgccgccttcgccgatatctacgaacactcgccatgggtggccgaaaaggccttcgatctgggccaggacacttcgatcgaccagatcgaaaccctgcaccagcgcatgagcgacatcctgttgagcgctgatcatgcccgccaactggcgctgatcaacgctcacccggacctggccggcaaagccgccgtccagggccaactgacccaagccagcaccgatgaacaagctggcgcggggattcaccaatgcacggccgaagagttctcgcgcttcaccgagctgaacgacgcctacaaggccaagttcaagtttcccttcatcatggcggtaaaaggcagcaaccggcaccagatcctcgccgcgttcgaaacgcgcatccataactcggtggacaccgagttcaagtgcgcgctggacgagatcaacaagatcgcgttgttccgtttactgaccctctaaacgaccatccccagccactctattcaaggcagacaagaagaatgaaagcttacgccgtacctttcgagaagttcgtcaacctggccgacgcccgcctgggcaccaagatcatctctgttaccgatgactggttcgccgacgccaaccgcctgttccagccgaccccggccgtgtggaaggagggcgttttcgatgacaacggcaagtggatggacggctgggagtcgcgccgcaagcgcttcgaaggctacgacagcgcggtgatccgcctgggcgtgccgggctcgatcaaaggtgtggacatcgacacttcattcttcaccggcaacttcccgccatcggcttccctggaagcctgcttcctggcttcgggcgagccggatgacaacacccagtgggtcgaagtgctgtccgccgtcgagttgcaaggcaacagccaccactaccacgagatcaacaacgaccaggccttcagccacctgcgcttcaacatctacccggacggcggcgtggcgcgcctgcgcgtatacggcgtgccgttccgcgactggtcctcggtgggcgacaacgaacaggtcgacctggcggccgcactcaacggtggccgtgccctggcctgctccgatgaacacttcggccgcatgagcaacatcctcaacccaggccgtggcatcaacatgggcgacggctgggaaaccgcgcgtcgtcgcacgccaggcaatgactgggtaatcgtggcgctgggtcacccgggcgagatcgagaagatcatcgtcgacaccttgcacttcaagggcaactacccggacacctgctcgatccagggcgcgttcgtcaagggcggcaccgacagccagatcgaaacccaatcgctgttctggcgcgaactgctgccggcgcagaagctggaaatgcacgccgaacataccttcgccgagcagatcaaggcgctggggccgattacccacatccgcctgaacgtgttcccggatgggggtgtgagccgcctgcgtgtattgggcaaagtagccaagtaagcggtgaacccgatcgcaggcaagccagctcccacatttgactgtattcacaaatcaaaatgtgggagcgggcttgcccgcgatggcggcagaacaaaccacacaaaattcggataagaagacagccatgcgcacactagtgatcgaacccctgaccaaagaagccttcgcccctttcggagacgttatcgaaaccgatggcagcgatcacttcatgatcaacaacgggtcgaccatgcgctttcacaaactggcaacggtggaaaccgcaacgccggaggacaacgcgatcatcagcatcttccgcgccgatgcgcaggacatgccgctgaccgtgtgcatgctggaacgacacccgctgggcagccaggctttcattccgctgctcggcaacccctttctgatcgtggtcgcgccacttggcgatgcacctgtatcgggcttggtccgcgccttcgtcaccaacggcaggcagggcattaattaccatcgcggcgtctggcaccacccggtgctgacgatcgaaaagcgggatgacttcctggtggttgatcgcagtggcacaggcaataactgcgatgagcattttttcaaagaggatgagcggttgatcctcgccccccaccaataagagaaggtctgatcacccgacaacaagggtgacaggcgagaggtaaagactgtggaagcacatttgatggaatggctgaacctgagcgtgcgctgggttcacatgatcacgggcgtcgcgtggatcggcgcttctttctacttcgtctggctggaaaacaacctcaatcgcgtcaaccccaagagcggcctggccggtgacttgtgggcgatccacggtggcggtatctaccacctggaaaaatacaaactggccccgccgaccatgccggacaacctgcactggttcaaatgggaagcctatttcacctggatgtcgggcatcgcgctgctatgcgtggtgttctactggaacccgaccttgtacctgctggccccggacagcagcctcagtggtccggaaggcgtattgctgggcattggctcactgttcgccggctggttcatctactccttcctctgcgactcggccctgggcaagcgccctgccctgctcggtttcattctgttcgtgctgttgatcgccgccgcgtacgggttcagcaaagtgttcagtgggcggggtgcgtacctgcacgtgggtgcagtgatcggcaccatcatggtgggcaacgtgttccgcatcatcatgccggcgcaacgcgcgctggtggcggcgattgcggaaaaccgcacgccggaccctgcgctgccggccaaaggcctgctgcgttcgcgacacaacaactacttcaccttgccggtgctgttcatcatgatcagcaaccacttcccgagcacctacggcagccaatacaactggctgatcctggcgggcatcgcagtggcggcggtgttggtgcgtcactacttcaacacccggcataacagccagaagtatgcgtggacgttgccggtgggtgcgttggcgatgatcagcctggcctacgtgaccggccccaagccggtggccgaagtggccaaggcccccgcggccatcgagtaccaaccattgccggaaaccgcactgggcggtggcttgaaaccggcagcgcctgcagcacccgccgctgaaccggcgccggcccaggcgacgattgatttcgacaaggtccacggggtgatccaggaacgctgcgccgtgtgtcactcggccaagcctaccagcccgctgttcagcaccgcacccgctggcgtgatgttcgacaccccggcgcagatccagcaacaggcggcgcgcatccaggcgcaggccgtggcgagccagatcatgccgttgggcaacatcacccagatgacccaacaggagcgggatttgatcggcacctggatcaaccagggggcgcgtaccaactgacaggctggcgcagatccaaatgtgggagggggcttgcccccgatggcagtgtgtcattcaacgcatcagtgactgaaccactgcaatcgggggcaagccccctcccacaagggtctccagtgttttgaagattgagctctacccggcaattgaatgccaaacaacacaacaataaaaaagatccgaggtgttgcatgaccgagttagccgaaccgcagattcccgccgcacccgccctggtgcggctgcccctcttgcaactgattctggtaggcctgcaacacgtcttgctgatgtacggcggcgccgtcgccgtgcctttgatcattggccaggccgcaggcctcagccgtgaagaaatcgcctttctgatcaacgccgacctgttggtggccggcatcgccaccctggtgcagtcgttcggcatcggcccggtgggcatccgcatgccggtgatgatgggcgccagtttcgccgccgtcggcagcatggtcgccatggctggcatgcccggtatcggcttgcagggcatcttcggcgcgaccatcgctgccgggttcttcggcatgctgatcgcaccgttcatgtccaaggtcgtacgtttttttccgccgttggtgaccggcacagtgatcactgcgattggcttgtcgctgtttcccgtggcagtgaactgggcaggtggtggcagtgccgccgcgactttcggctcaccggtctacctggcgattgccgcgctggtactggccaccatcctgctgatcaaccgcttcatgcgtggcttctgggtgaacatctcggtgctgatcggcatgggcctgggctacgccttgtgcggtgccatcggcatggtcgacctcagcggcctgtctcaggcgccgtgggtgcaggtggtgacgccgttgcacttcggcatgcccaggttcgagttggcgccgatcttgtcgatgtgcctggtggtggtgatcatctttgtcgagtccaccgggatgttcctcgcgctgggcaagatcaccgggcaggacgtcacgccgaagatgctgcggcgcggcctgctgtgtgatgccggtgcgtcattcttcgccgggttcttcaacaccttcacccactcttcgttcgcgcagaacatcggcctggtgcagatgaccggcgtgcgctgccgttcggtgacgatgatggccggcgcgtttctgatcgtactcagcctgctgccgaaggcggcgtacctggtcgcgtcgatcccaccggcggtgctgggcggcgcggcgattgccatgttcggcatggtggcggccaccggaatcaagatcctgcaggaagccgatatcgccgaccggcgcaaccaattgctggtggcggtgagcatcggcatgggcctgatcccggtggtgcgcccggagttcttcgcgcaactgccgctgtggatgagcccgattacccacagcggcatcgccatggccaccctcagcgcgttgtcgctgaatatcctgttcaacattctcggcggttctgaacgacctgccgttgctcctacgcattgattccttcgttcgcacaaaaacaataacgaaacagggaacatcaacatgcacacccttcacctggggccggtcacaagccgtgccccattctcgccccgcgcgcgctgtaacggcgcacttgagcccaggcctgggagccagtattctccgcgcccgctcgaatcgactcaaaaaaaaacagcaaatgtaaaagctgactgcaaggccaacttatcccggcctcctgtctgcggccaaagtgcgcaaatgtcctctgaattcgactgcatctcatgcagccgacggggattttttggcttttttaacaccttggcgcagctcttgctaaaagcactaaagctgaccgaacagacgatttttgcagcgaaccaaaaggcgccacaccagagcgcctgcgtagaagaaaaaccataaaactttaactcgggagcaaccgaatgaaacctatgttcaaaggcctgatgctggcgggatccctgctggccggtggccaagccgtggccggtgacctgttgcagtggcagaacaacagcctgacttacttgtggggcaagagctttaccgtcaacccgcagattcagcaaaccgtcacgttcgaacatgccgatgcgtggaagtacggtgataactttgtgttcgtcgaccgcatcttttacaacggcaaggaagacggcaacgtcgggcccagtacctattacggcgaaatcagcccgcgcctgtcattcggcaaaatctttgataaagacctgtcgttcggaccgatcaaagatgtattgctggcctttacttacgagttcggcgaaggcgacaacgagtcgtacctgctcgggcctggctttgacttgaacatccccggtttcgattacttccagttgaacttctaccagcgccagaccgaaggcaatcgcccgggtgacggtgtatggcagattaccccggtgtggtcgtacaccatccccgtgggcaactccgatgtgctgatcgacggtttcatggactgggtgacggacaacgacaagaacgcccgtggcacctaccacgccaacctgcacttcaacccacaggtcaaatatgacctgggcaaggcgctgcattggggcgacaagcagttgtacgtgggctttgaatacgactactggaagaacaagtacgggatcgaagattccggcgcgttcaagaccaaccaggacacggcaagcttcctggtcaagtatcacttctaaaagccactgcaagacaaatgtgggagggtgcttgctcccgatagcggtgtgtcagtcagtacatcagtgactgaacaactgctatcgggggcaagccccctcccacatttggatctatgccaggcctaggaaccgagtgatttcctcacgtttggccagcgcatctttgcgccccagctcgatcaactcgctgcaatatcccgcctcgaacagcaggtaactcaacacccccgccccgctcgtcttggtcgcccccggcccgcgcaaaaacaagcgcaacgccgccggcagttcctggcgatgccgcgctgcgatctcatcgatcggctggctgggtgcgatcaccagcacctccaccgccgccacaccaggcgcgacatggctgaactggttcaagcgttcgagcaattcgatatcgccttccaggctgtcaatgaacgtgctgttgagcatatgcccaccgatctgcgccagggtcggttcctgaccggtgtagctgcgctgcaccgccggttcattgcctcgtgggttgccgctgacacccaccaccagcacgcggctggcccccaggtgcaaggccgggctgatcggtgctgattgccgcaccgcaccgtcgccgaagtactcctggtcgagtttgaccggcgcgaacaacaaggggatcgccgagctggccagcaggtgttcgaccgtcagttgagtcggcaggccgatacggcggtggcgcagccaggcatcgatggtgccgccgccctggtagaaggtcaccgcctggccggactcatagccgaacgccgtgaccgctaccgcatgcaggtgtttggcgcggatcgcttcgtcgatgccgtccagatgcagtttgtctttgagcaacgccttgagcggcgtgctgttgagcagtgccaccggcacttgcgcgcccaagcccagcaggctgtggataaagaagcgactcgcctggcgaatcactcccggccaatcactgcgcaacaccagatggctgcgaaagccctgccagaacgcggtaagacgttggatcgcggcggtgaagtcggtggcgccactggccaggctcaccgcattgatagcgccggccgaggtgccgacgatcaccggaaaaggattaggcgcccccggtggcagcaactcggcaatcgccgccaatacccccacctgatacgccgctcgcgccccgccgccggaaagaatcaagcctgtaaccggttcagctgggcgcattgcgtcactccatgtggggaaaagtcgttcttatcagcggcgtttttcgtacagcttgggttcacccggcggccggctcttgaagcggcggtgggtccacaggtattgctcggggcattcacgcacggaggcttctacccattggttgatgcgcaggcagtcgacttcatcgctttcaccgggaaaatcggtgagcggcggatggatcaccaggcggtaaccgctgccatcggccaggcgctgttgggtgaacggcaccaccagcgccttgcccagcttggcgaacttgctggtggccggcactgtggcagcctggatgccgaacagtggcacgaaaatactttgcttggcgccatagtcctggtccggtgcgtaccagatggcacgcccggcacgcagaagcttgagcatgccgcgcacgtcttcgcgctccacggcgagggaatcgaggttgtgacgttcgcggccacggcgctggataaagtcgaacagcgggttgccgtgctcgcggtacatgccatcgatggtgtgcttctgccccagcaacgctgcgcctatttccagggtggtgaagtgcagggccatgaggatcacgcccttgccatccaactgggcctgcttgaggtgttccaggccttcgacgtgggccaggcgcgccagtcgcgggcgcgaccaccaccagctcatggccatttcaaagaacgcgatgccggtggaggcaaagttttccttgagcaactgtttacgctctttggcggatttttccgggaagcacagttccaggttgcgtgcggcgatacggcggcgttcgccggccacgcggtacatgcccgcacccagcaggcgaccgatggtcagcagcgcgcggtacggcagttgggtgaccagccacagcaggccgagccccagccataacagccagaaacgcgggtgaaaaaatacagctcgaaaacgcgggcgatccattacagattccggtaaagacaagggccgcgcattctacaacggttcgacccggcttgcggcgggtgagtgttctcgttataagtctcgacacttttcgtgacaagccgcttttgccgaccatgagccaaaccgaaccgctagaccaagatcccgtgttccagctgaaaggcagcatgctcgccatcaccgtgctggaactcgcccgtaacgacctcgacgccctggaccgccagctggcggccaaggtcgccctggcgccgaacttcttcaacaacgccccgctggtgctggccctggacaagctgcccgccggccagggcaacatcgatttgcccggcctgatgcgcgtgtgccgctcccatggcctgcgtaccctggcgattcgcgccagccgtatcgaagacatcgcggcagccatcgccattgaactgccagtactgccaccgtccggtgcacgcgagcgtccactggaaccattggtcggtgaagagaagaaaaaaccggaaaaaccacccgagcctgcgatcaagcctacaaagatcatcacctcgcccgtacgcggcgggcagcagatttacgcccagggcggcgaccttgtggtgatctcctcggtcagcccgggggcggaacttctcgccgatggcaacatccatgtatacggcccgatgcgcggacgtgccctcgccggcataaagggtgataccaaggcccgtattttttgccagcagttgaccgctgagctagtgtccatcgcaggccagtacaaggtttcggaagatttgcgccgtgatccgctgtggggggcttcggtgcaggtcaacctgtcgggcgatgtgttgaacatcatccgtctttaacggatactgccgcattttccaagcatctctagactctgatagcacagcgaaaccggcattacttatgtaggaattttttattcctacaaggctgtccgcctgcagcgagttccaagagatgtttttcagggactgaaaagtcctttttccttaggggtgaaacaccttggccaagattctcgtggttacatccggcaagggtggtgtgggtaagaccaccaccagcgccgctatcggtaccggcctcgctctgcgcggccacaagacagttatcgtcgacttcgacgtcggcttgcgtaacctcgacctgatcatgggctgcgaacgccgtgtggtgtacgacttcgtcaatgtggtcaacggcgaagccaacctgcaacaggccctgatcaaggacaagcgccttgagaacctgtacgtgctggccgccagccagacccgcgacaaagacgcgctgaccaaagaaggcgtaggcaaagtcctggccgagctgaaggaaaccttcgaatacgtggtctgcgactcgccggccggtatcgagaccggtgctcacctggcgatgtactttgccgatgaagccatcgtggtgaccaacccggaagtctcctccgtacgcgactcggaccgcatgctcggcctgctggccagcaagtcccagcgcgccgagaaaggcgaagacccgatcaaggagcacctgctgctcacccgctacaaccctgaacgcgtcagcaacggcgagatgctcggcgttgaagacgtgaaggaaatcctcgcagtgaccctgctgggcgtgatcccagaatcccaggcggtcctcaaggcctccaaccagggcgttccggtgattcttgatgaccagagcgacgccggccaggcgtacagcgatgccgttgatcgcttgttgggcaagaccgtggaacaccgcttcctcgatgtcaagaagaagggattcttcgagcgtatctttggaggcaactaaacaatgaaatttctcgacttctttcgcgccaacaaaaagccaagtaccgcgtcggtagcgaaagagcgtctacagatcatcgtggcgcacgaacgcggccaacgcagcacgccggactacctgccagccttgcagaaggaactggtcgaggtgatccgcaagtacgtcaatatcggcaacgatgacgtgcatgtcgccctggaaaatgacggcagctgctcgattctggaactcaatatcaccctgcctgatcgttgatcgaacaggcggccgccacggcggctcggtcaccttgatcccttttcgggaaccgggtgggcgagccgccgttggcgtttgttacgaggctgtttaatgccgctgtccaatatccacatcctgtatcaggacgatgccgtcctggtggtgaacaagcccaccctgctgctctcggtgcctggccgcgccgacgacaacaaggactgcctgatcactcgcctgcaggaaaacggctaccccgaagcccgtatcgtccatcgcctggactgggaaacctcgggcatcattctgctggcgcgggatgccgacacgcaccgcgagctgtctcgccagtttcacgaccgtgaaaccgaaaaagcctacaccgccctggcctggggccaaccggaactggacagtggcagcatcgatttgccgctgcgctacgacccaccgaccaaaccccggcatgtggtcgaccacgagttcggcaagcatgcgctgaccttctggaaggtgctggagcgttgcggggactggtgccgcgtcgagctgacaccgattaccgggcgttcgcaccagttgcgcgtgcacatgctctccatcggccacccgctgctgggcgacggcctgtatgcccatgagcaagccctggccgcctggccgcgcctgtgcctgcatgcaagcatgctgagcttcacccacccacagagcggcgagcgtttgcgtttcgagtgccctgccccgttctgaagaataaatacggtaaactcgcggcattgttgtctggagctatttatgcgcgaagcgttgaatcaaggcctgatcgacttcctcaaggcctcccctactccttttcatgccactgctgccctggcccagcgcctggaagcggccggttaccagcgtctcgatgagcgcgagacctgggccaccgaggccaacgggcgctattacgtgacccgtaacgactcctcgatcatcgccttcaagctcggccgccattcgccgctgcagggcggcattcgcctggtcggcgcccacaccgacagcccgtgcctgcgggtcaagccgcagcctgagctacaacgccagggcttctggcagttgggtgtggaagtctatggtggtgcattgctggcgccgtggtttgaccgcgacctgtccctggccggccgcgtgaccttccgccgcgacggcaaggtcgaaagccagttgatcgacttcaagctgcccatcgcgatcattccaaacctggccattcacctcaaccgtgaagccaaccagggttgggcaatcaatgcccagaccgagctgccgccgatcctcgcgcaatttgccggtgacgagcgcgtggacttccgcgccgtgcttaccgatcaactggcgcgcgagcatgggctgaacgccgacgtggtgctcgactacgagttgagtttctacgacacgcaaagcgctgcggtcattggcctgaatggcgacttcatcgccggcgcacgcctggacaacctgctgtcgtgctacgccggcctgcaagccttgctcaccagcgacagcgaagaaacctgcgtgctggtgtgcaacgaccacgaagaagtcggttcctgctcggcatgcggcgctgatggcccgatgctggagcagaccctgcgtcgcctgctgccggaaggcgatgaattcgtacgcaccattcagaaatccctgttggtgtcggccgataacgcccacggcgtgcacccgaactacgccgagaaacacgacgccaaccacggccccaagctcaacgccggcccggtgatcaaggtcaacagcaaccagcgctacgccaccaacagcgaaaccgccgggttcttccgccacctgtgcatggcccaggaagtaccagtgcagagcttcgtggtgcgcagcgacatgggctgcggctcgaccatcggcccgatcaccgccagccacctgggcgtgcgcaccgtggacatcggcctgccaacgtttgccatgcactccattcgtgagctgtgcggcagccatgacctggcgcatttggtgaaagtgctgggcgcgttctacgcgagccacgatctgccctgataatttgggctgactcggtcaaaaatgtgggagggggcttgcccccgatggcggcggatcagtgactatatttgtagtctgaccctctgcaatcgggggcaagccccctcccacattagatctgcgtatacctgacctgcatcacctgcactttctgcaatccggcctagacttgtcagtattcccactccgacaaggccgtcccctcccatgatctccatgtcttccttccacgccatgcttatccctatcctgatcggcatgatcatgttggccgtgggtttcaactttcgcgacaagcccctcggcgtgttcggcatgtggctcggcatgctgctgatcctgggcaccgtggtgtacaagatcctcgccaaactggccgaatgacgcttgcactcgtacactcgctcaacccgtcgtttccaaggttgaccgcctcgtgctttcccgtctgtttgccctgccctgctattgcttgatcgccctgctcaccttgctgccgctcacgcctgcccatgcagtgggtttgcccggcttgctgggcagtaccaacaagacccagccccaggccgaagtgccactggggcagtcgctggacgaggtgatcaagaccctggaaaacgaccagcagcgcacccagttgctgagcgacctgaaaaagctgcgcgccgccacgcaaaaggcccaaccggccgccgaagaaggcgtgctgggcttgatcggcggcaccctggccaacctggaggcacagttctccggggccgacagcccgctggggcgctggtccaacgaagtcgacctggccaaggaagaactcgacgcactgatgctgccggccaatgaatggctgccgatcattttcgggtttgccttgatccttgccgtgtggagcctgttggcgtacgcgctgatctggctcagtcaccgggtgcgcgaacgtttcggcctgcccgaagaattgccgcaacatccacgcacctgggacatggtgcgcttcgccctgcgcaagctcggcccatggatgatcgccctggtgatcacggtgtacctgagctacgccctgccctcgtccctgggcaagtccctggcgatggtgctggcctacgcactggtggtcggcacctgtttctcggcgatctgcgtgatcgcgttttctgtactcgacggcccgcaccgtcatcgcgcgctgtatatcctgcgccaccaggcgttccgcccgctgtggtggatcggcagttttgccgcctttggcgaggccttgagcgacccgcgactggtccaggcgctgggccagcacctgtcccacaccgccgcgacggtcgccaatgtgatggcggcgctgtcgaccggtgtattcatcctgcgtttccgccggcccatcgcccacctgatccgcaaccaaccgctgtcgcgtcgcctgacgcgccgcgccctcagcgacaccatcgaaatcatcggctccttctggtacatcccggccttgctgttggtgggcatctcgctgttcgccaccttcgtgtctgccggcgataccagcacggcgttgcgccagtcgctgttgtgtacggtgctgctggtgttgtgcatggtgatcaacggcctggtccgtcgccacgcgctcaaaccgcagcgtgggcacaagcgtcacgcgctgtattccgaacgcctgaaaagcttcgtctacaccctggcccacctgatcgtgtggctggtgtttatcgagttgggcctgcgggtgtggggcctgtcgctgatccgctttaccgaaggcgatggccatgaagtcagcgtcaagctgttcggcctggccgggaccttgctgttcgcctggctgatctggattctcagcgacaccgcgatccaccatgccctcacccgctcgcgcaaaggcctggccaacgcgcgggcgcagaccatgatgccgttgatccgcaacgtgctgttcgtgaccatctttatcattgctgccatcgtcgccctggcgaacatgggcatgaacgtcacgccgctgctggcgggcgccggtgtgatcggcctggccattggtttcggcgcgcagtcgctggtggcggacttgatcaccggcctgttcatcatcatcgaggactccctggccatcgacgactacgtggatgtgggcggccacctgggcacggtggagggcctgaccatccgtaccgtgcgcctgcgggatatcgacggcattgtgcacaccatcccgttcagcgagatcaagagcatcaagaactactcgcgggagttcggctacgcgatcttccgggtggcgatcccctacaacatggaaatcgacgatgccatcaaactgatgcgcgatgttggccagaaaatgcgcaacgacccgctgcaacgccgcaacatctggtcgccgttggagattcagggggtggagagtttcgagtcgggcagcgcgatcctgcgggcgcggttcaagacggcgccgatcaaacagtgggaagtgtcgcgggcgttcaacctgtcgctgaaacggcatctggatgaggcggggttggacctggccacaccacgcttgagcgtgcaggtggtgacgggggcttcgggcggattagacaaagaaaaaaatacctgaaagcaacacagctcaaaatgtgggagggggcttgcccccgatgnnnnnnnnnnnnnnnnnnnnnnnnnnnnnnnnnnnnnnncatcgggggcaagccccctcccacatttttgatctgtggcgtttacacgatcgcagtgccatccatcttctggcgcaggctcaacgggcgcatgtcggtccagacttcttcgatataggccaggcactctttcttcaggccgctcttgcccacggtgcgccagccttccggcacggccttgtagtcgggccagatggaatactgttcttcatggttgaccactacctgaaacaggatgtcgtcgcggtcaaatactgaggtcattgctgttctccatcgctaaaaggctggctgcgcaccgtgcgcagccctgatatctgtagaaacgtaccaggctggcaaaaaattagaggctggcgaccgctgccgccaacgcgcgaccgaagatgtccgccacccggtccacttcggcggcagtgatcaccaatggcggcaggaagcgcaccacactgccgtgccgaccgcccagttcgaggatcagcccgcgcttgaggcattcacgctgcaccagcggcgccaattggcgatgcacgggcggatggccttgaatgtccggcgtgccgttcgggtcgaccagttccacgccgagcatcaacccacggccccgaatatcccccaggtgcgggaagtcgcgctgcaggatgcgcaggtgttcacccaggcgctcgcccatggccgccgcgtggccggccaggtcgtgatccttgaggtagcgcatcaccgccgaacccgccgccatggccatctgattaccacggaaggtcccggcatgggcgcccggcagccaggtgtcgagccagtcgcgatacaccaccaccgccagcggcaagctgccgccgatggccttggacatcaccaccacatccgggatgatcccggcgtgctcaaaggcaaacatcttgccggtgcgaccgaaaccgctctggatttcatcgacgatcaacgccacgcctgcctgctcggtgatgcggcgcaggccgcgcagccagtccaggtcagccggaatcacgccgccctcgccctgcaccacttcgacaatcaccgccgccggcagcaatacaccggcctccggatcattcagcaggttttccaaataatgcaggttgacccgcacgccttccgcgccacccaggccgaacgggcaacggtagtcgtaggggtatggcaaaaattgcacaccattgccgagcaaggcgcccaggggtttcttcggccccaggctgcccatcaggctcaaggcgccctggctcatgccgtggtaaccgccctggaaggacaatacggtgctgcgcccggtggcggtgcgtaccaacttcaacgcagcttccaccgcatcggtgccggtggggccgcagaactggattttcgcttcccgcgccagcgcgggcggcaacaaaccgaacaggtcctgcacgaactggtccttgaccggggtggtcaggtccagcgtgtgcaggggcagttcatcggccagcacctgttgaatagcctcgatcacgaccggatggttatgccccagcgcgagggtgccggcgcccgccaggcagtcgatgaagctgcgcccttcgacgtcttccacgtaaatccccttggcacgcttgagtgccaggggaatgcgccgcgggtagctgcgggcattggattcctgctggcgctgacgggccagcagcggggtttcgtcgaactggtaaagcgtttcatgcacctgggcgtcttcgatacggctggtagcgactgacatttctcgatccctcaatacgctgatgatggtgaccaaactgccgatccgctggcgtctggccccaaggggcatgcgcacggatttcctgttctggaaacgcaccagcgtcgaggggatttagggcctttgatcactcaaaaccaaatgtaggagggggtttgcccccgattgcagtggatcagtcactggtgttgtgactggcagactgcaatcgggagcaagccccctcccacattggaactgcgttcggcgtcatagaccgcggtatttttcgttcagtgcatacaaaatcgcgcaggtctccgcatccagaaacccgcagtaatcccgcgcccgaaagtgcatctgaaacgcccgcgtcctctgttcaaacccttgccgattcttcgccggcgcatagccatagcgttgaaacgcccgctccacctcgacctccggcggcaggcccaggcaaaaccggcgctgatacatcgcccgcgtcgcctcatcaaaccaggcccccacccctgcttcatgcagacaccgccaaggcaggcgcggccccggatcgctcttgcgcccgaacgccacgtccgcatgcccgaggaggtcggtgggcccgatctgcgggtatcgcccaagaatgtcgcgaaccagcgcaatcaatacgtcgacctgttcctgcgcgtaggcaggaaagctgaacacgccaccgtcatcccgcgccaggttgacgatctcgatgccaatcgaacggctgttgaggttgtcgcgccccgcccaatgactcaccccggcgtgccaggcacgcttgtcttcctccaccaaccggaagacacgcagctcttcatagcccgccgcgcgatagtcgggctcatcagggtcgggcagcaagtagtgggcactcaccccatcctgagtcagggtacgcagggaggcaccaaaaggcgctgcggtgtaatgcaggatcacctgccgcacgggctcgccgttgcgttcgttgaagcctctggcagggaaactggtatcgatgaccaacatgagaaccgtccttttcaatacaggccgagtcgttcagcccgttcaagcgcaaaaaaattaccgccatcctgaaggcttgaacttcaggagggcggtaactatttggcacttgaaagaaaagtgatcagcagcgcaacggcatgcccaggtcgacgcgcaaaccatccggccgactgtcgaatttcaacgagcaggaacagcgttgcacgatcgcttgcacaatcgccaggcccaggccacagccttcgctgttaccgttgcgccagaagcgttgggtcaggtactgcaggtcctcggcggcaatctgtttgccgtggtcacgcacgcggaacaccacattatcggcttcggtgaacacgctgagctccacccgggtgtccgtcggcgtgtggcgcaacgcgttgtccagcaggttgcgcaaggcggcgacagcgaggcccaccggcatccccaccggggtggccgagaggttgtccggcaggatcaggtcgatgcgcgagttgtcaccggcattggcatcctggatcgccaggcgcgctacttcttcggcactggagtgcatgccatcgtcaaacgacaggttgccctccacccgggccagcaacagcaattgctccagggtccgatgcaggcggtcggcgccctcctcggcatgggccagggactggtcgcgggccgcgccctcggtcatgcgcgccacttgcaggtgggtcttgatcgcggtgagcgggctgcgcagttcgtgggcggcgtcaccggtgaggcggcgctcgcgctcgatggtcttggcgatgcgttgcaacagctggttctgggtgtcgagcagcggctcgagttcgctgggcaacgggtggatctgcagcggttcaagggagtcggcactgcggcgcatcaaggcgtcacgcatacggttgagcggcagcaggctctggccgatgcccagccacaacaggcacaggcagcccagcatcgccacgcccaccggcaccgacgctgccagcaggatcgacaggttcagcgcctcgcgctccacttgccgatcggccgtggtgatcagcaggtcaccccgggacagggtgaaactgcgccagcccacgccatcgacgacctggtcgcgaaacccgctcttgcgcgactccaacccctcatccggcgtggtgtggctgcgcgccaggatttccccgcgcagggaactgacctggcaggccatgccgccgggcacattcaattgttcagcgctgaaatgcgcgccgccgctgacgctggccaggcccggcatctgttcggtcagccccgccaccatgcgtgccgacgccaccaggcgttggtcgagggagaacatcatctggttgcgcaggtcgttgagcatccaggccgccgccagggcccagatcagcacaaaggcggcgcccagcttgaacgtcaggcgcagacgcaggcttttcacgatgcgtcctcgcctccatcggccgggccaaggcgatacccgaggccgcgcacggtctcgacgatgccattgcccaatttgcgccgcaggtggtggatatgcacgttgagcgcgttgctttccagctcgtcgttgaagccgtagacgctgtccttgagctgttcgctggagagtacccggcctttgttgtgcagcagggcttgcaacagcgcctgttcgcgacgcgacaggtcgacgggctcgccgcccaggaaggtttcgcgactgctggggtcgtaagccaggcggccatgctcgatcaggttgacgctgcgccccgccacccgtcgcaacagggtttgcaggcgcgcggcgagttcgcgcaggtcgaagggtttgagcaggtagtcatcggcgccggcttgcaggccgtcgacgcggttggtcaccgagtcccgcgcggtcaggatcagcaccggtatctccagaccctggctgcgctgttgctgcaacaacttgaggccgtcttcgtccggcaggcccaggtcgagcaccatgatgtcgaacgtcgccgccttgagcatcgcgcgtgcggcaccggccgtggccacgtgttcgacggtgaaaccctgggcggtgaggccggccacaatgccgctggcgatcagtttgtcgtcttcacagaccagtacgtgcatggtgaacccttcatgaaagatggggagattaaaggggctgcggattaagcgcagattatgccgctaaacaccccacactcaatctagaatagccgtggttaatcatcggttaatcaacgccacacattgtgtgcctacttgcatcgaactaaggcctgaccatgcggcatctgtttacctttctgctggtgttgttcgcggggctggcccaggccgcgccgggcaacccgtttgagaccaaacccgatttcctcccggtgggcaaggccttcacctttacctccgaacgtcttgaaagtggcgagacccagttgtattggcagattgccgacggctattacctgtacaagcagcgcatgaaattcgacggcctggccgaaaagcccgtgctgcccaaaggcgaggcccacaccgacgagttcttcggcgaccaggaagtgtatcgccaaggcctggaagtgaagattcccgccggcgccaccggccaggtcaagctgggctggcagggctgcgccgacgcgggcctgtgctacccgccgcagtcgatcaccgtggacctgggtggcaaccccgccgtcgccgccaccgcacaagcccaggaccagagcctggccagcggtttgcaacagcgcagcctgggctggagcctgttgatattcttcggcctcggcctgttactggcgtttgcgccgtgttcgttgccgatgttgccgattctcgccggcctggtggtgggcagtggcgccagcccgcgtcgcggttttgccttggcgagcagctacgtggtgtgcatggcgttggtgtatgcagcgctgggcgtattggccgcgcttttgggtggcaacctcgccgcttggctgcaaacaccttggattctcggcagcttcgccgccctcttcgtggttcttgccctgccgatgttcggcttcttcgagctgcaactgccggccttcctgcgcgaccgcctggacaacgtcagccgccagcaaagcggcggcagcctggtgggggcagggattcttggtgcgctatccggcctgctggtgggcccgtgcatgaccgcgcccctggccggcgccctgctgtacatcgcccagagcggcaatgcgctgcacggtggcctgatcctgttcgccatgggcatcggcatcggcattccgctgttgctgctggtgaccgtgggcaaccgcttcctgcccaagccgggcacctggatgaacgtgctcaagggcatcttcggcttcctgttcctcggcaccgccgtgttgatgatccgcccggtggtcggcgaaaacctgtggatcggcctgtggggcgtactcgcgctgatcatggcctactgcggctggaccctggcccgcgaatacggtctggccgccaaagtgtttggcgcaggttccctggtactgggcctgtggggcgcggtgctggtggtgggcgcagcggggggcagcgacgacctgtggcaaccgctgaaggtctacagcggttcacgggtcgccggcgcagcgtccgcccacgatgccttcatgaccatcaacgacccggccgtgctgcaaagccagctcgacagcgccaaggcccaaggccaatgggtgttggtggactactacgccgactggtgcgtgtcgtgcaagatcatggaaaaacaggtgttcggcaaacccgaagtcatgcaggcactcaaagacgtacgcctgctgcgcctggacgtcaccgccgacaacgccgccagccgcgcgctgctcggccgctacaaagtgcctggcccaccgagcttcgtgtggatcggcccggacggtgaagaacgccgcgcccaacgcatcaccggcgaagtggatgccgccgctttcctgcaacgctggacgcaaacccgagacgctctctgatgctgaccctgaccatcggcaccttcgccatcgccctgaatcacatcctgctgatcagcgcgctgattctcgccaccctggtgggttggcgcgtggccaagcgtggtggtgaaaacccggaatcggtgctgttcagcctgttcctgctgggcatgctcgctgcccgcgtcagctttgtgctgatgtactggagcgactaccgcaacgactgggtgcagatggtcgacctgcgcgacggcggcttccttgcctggcccggcgtgatcgccctggtcttgggcgctctcgcctacggctggcgccgcccagccctgcgcaagccactgagcgccggggtgatcaccggcctggtgttctggggcatgaccagcttgtccctgagcctgtatgacaagggctcgcagttgccggagataaccctgcgcaatgccaatggcgaggtggtgcaattggccgactacaagggcggcccgctggtgatcaacctgtgggccacctggtgcccgccgtgccgccgcgaaatgccggtgctggagcgtgcccaacaccaacgtcccgacgtgaccttcctgttcgtcaaccaggccgaaagcatgcagagcgtcagtacctttcttgcgacccagggcctgacgctggacaacgtgctgttcgacgccagcggccgcctcggccaggccgtgggctcgatggccttgccgaccaccttgttctatcgagccgatgggcgcttgatcaacagccacctcggcgagttgtcccaggccagcctggcccgcgccatggaacccttcgacaccgcccctgaaaggaaaccgacatgccaagcctccgccacctgctgaccctgctgccgctgacactcgcggccaccctggcccaggccgaagactggcccgcaccgatcaaacagatcgaggccaagggcgccaagatcctcggcaaattcgacgcccccagcggcctcactggctacgccgcccgctaccagaaccgtggcatggccctgtacctgaccgccgacggcaaaagcgtgatcgccggcaacctgtacgacgcccaaggcaacgacctgagcagcgcgccgctggaaaaactggtgtacgcaccgatggcaaaggaagtctgggccaagatggaaaaaagcagctggatccaggacggcgacgtcaaggcgccacgcatcgtctacctgttcagcgaccccaactgcccttactgcaacatgttctgggaacaggcgcgtccgtgggtaaaggccggcaaagtgcagctgcgccacatcatggttggcatcatccgcgaagacagcccgggcaaatccgccgcgctgtttgccgccaaagacccgcagaaagcgttggaagaacatgaggccgccggtaaaggcagcaagttgcaggcgctggccaagattccggcggatatcgaggccaagcttgatagcaacatgaagttgatggatgagctggagttgtcggcgacgccggcgattttctatctggatgacaagggggggttgcagcagcagcaaggggcgccttcgccggagaagttggtgaagatacttgggccgaagtaggcggcgccttgactgacgccatcgggggcaagccccactcccacattagaaatgcgctccaaatgtgggagggggcttgcccccgatgaggccctgactgacagcgaaaattaaagcccctccaactccgccatcaaatcactcaaccgatccaccttctcggcactgatctcattcgccgccaacccctcgatatactcggccaactccgccaccgtgctgcactcgaacatcgcccgcagcggcacatcccgctgcaaggtcttctgcacccgcgaggcaatctgcgtggccagcaacgaatgcccgcccagttcgaagaagttgtcctgcacccctacccgctcgactttcagcacttcggcccagatgtctgccaaggtggtttccagctcattgcgcggtgccaggtagtcctggctgtgcaactggccgatctccagcgccggcagggccttgcggtcgagtttgccgttggcgttgagcggcaggcggtcgagccacagccagtgcaacggcaccatgtattccggtagctcggcgcgcaggcgttgcttgatgcggtccaggcgttcgcttgggttcagtgcctcatccgccgccaccagatagccgaccaggtgcttgccgttgacgccctcctgcacacccaccgccgcgtcgcgcacttccggttgttcgtgcaggcgcgcttcgatttcacccagttcgatgcggtaaccgcgaatcttcacctggtggtcgacacgtccgacgtattccagcgcgccatcactgcgacggcgcgcgaggtcgccggtgcggtacaggcgctcgcccggcgcaccgaacggattcggcacaaacaccggcgcagtgcgcagcgggtcactgacataaccgcgaccaacgcccgtaccggcgacgcacaactcgcctaccgcaccttggggcaccagctccagcgcaccatccaacaggtacaaacggttgttgtcggtcggcgtgccgatcggcagataggtgcctcgggtcgacgccaggtcgacgcgataaaacgccacatcgtccgagcattccgccgggccgtaggcattcaccagcccgatctgcggataacgctgcaaccattgatgcgccagttccggtggcatcgcttcaccggtcggcaacatccagcgcaggccgtccaggccgatacggtcctgggccagcatgccctggatcagcgacggcacgctttccagcacggtgatgccctgggcctgcacatgttccaacaggccctggggatcatgcgcgatagtgttcggcacgatgtccacccgcgcaccgaacaacggtgcggcgaggaactgccacacagaaatatcgaagctctgcgaagcggtctgcgcgatcacatccgcgtcactcaaggccaggtacggcaccttgctcaactggttattgagcatgccgcgctgttccaccatcacgcccttgggcaggccggtggagcccgaggtgtagatcacgtaggcgaggttgtccgggccgctgtagattcccgggttttcaccacgtgccggtatctcttcccacaccagcaattggcaatcgaagccgtccagcaactcgatggcctgctcgcggcacacctcggtgcacaccagcagcggcgtgcggctcaggtcgatgatgctgcgcagacgctggcttggcaggcctgggtcgagcggcaggtagccggcaccggccttgaagctgccgatgatcatgcccagcaggtcaaggttacgttcgcccagcaacgccaccggttgatcgaggcccacgccggctgcaatcagcgcatgacccaggccgttactgcggcggttcagttcgtcgtaggtccactgctgatcgaggcaactggcggcgatgcgctgcggatgcgcggccacctggtcctcaaacaactcgacatagctgcgctccagcggataggcgtgctcgctctggttgcagccctccaccaggaactggcgctcctgttcgccaatcaacggcaagtccgccatgtcgccatggaagccctgcaccagcgccagcagcaggcgcttgaactcgccgagcatggcttgcacggtggtctcgtcgaagtagcgctggtcgtaggacaggtgcagccccaggtcatcccccggatagcacacggccgtcagcgggaagttggtgtgggtgcggccggagtccgaggtggcattcaggctttgtgcacggtccagcaccgagacttccaccggggcgttttcgaacacgaacaggctgtcgaacagcggctggcccttgggcagttcgctgtgttcctgaatcgtcaccagcggcaggtattcgtactcgcgcagttgcatattgctgtcgagcaagccgctcaaccactggcgcacgctgcaacgctggtcgtcctcgggcagcttcacccgcagcgcgatgctgttgatgaacaggccaacggtgcgctgcatctcgggcatctctaccgggcgcccggccactgtgacgccaaacagcacgtcacggtcgccacttaaacggcgcaataccagcgcccacgctgcctgggcgaaggtattgaccgtcagttggtgagcctgggccagctcacgcaattgtgcaccgtcgcgagcgtcgaggcgggtgtaacagtcgcccaccaccatgccaccgtggccggcgtggtcacgcaggaacggccggtcactcgggattggtgtggtgcgctcgaaaccttgcaggttgtgctgccaccactgacgtgcttcgctcaggttctggcgttgcagccaggcaatgtagtcgcgatagcgcggcggtgtggccagttgcgcctcgcgcccctcgccgagggccatgtagatctcgaagaagtcattcatcagcaacgaacggcaccaggcatcgatgaggatgtggtggttgctcatcatgaaccagtagcgctcggcgccgacgcggatcaggcgcaggtggaacggggcctggttgagcagatcgaaaccggcttcgcgctcctgcttgagcagtgcttgcaggcgcggctcatgttcgctttccgggtcagcactccagtcgaggtattcaattggcgtgctgcccggtgcgtggatcacttgcagcatgtcttcgccgatgttccagcagaacgaagcgcgcaaggcttcgtgacgggcgatcaccgcctgccaggcctgggcgaaacgctcggggtcgagggcgctgttgatgcggtagcggtcctgcatgtagtagaggccggtgcccggctccagcaaggtgtgcagcaacaggccttcctgcatcggtgtcagcgggtagacgtcttcgatgacactggccggcaccggcaggctgtcgagttgcgcctgggtcagatgggccagcgggaagtcggacggcgtgaggccaccggcatcgtcctgcaagcagtgccgggtcaggctgtgcagttcggccaggtaggcctcggccaattcacgcaccgtgtgctgatcgaaacgctcacggctgaaggtccagcgcagcaccagttcgccgccgtacacctggctgtcgatgctcaactcgttgggcagcggcgcgtccgggtcatgggccaggccggcggactcgtccagcgggtggaacagcgcatcggcgccgaagctctggtcgaactggccgaggtagttgaaggtgacctgcgcgctcggcaaggcggccatgctgtgcttgcacacatcatcggccaggtagcgcagcacgccataacccaggcctttatgcggcacgccgcgcagttgctccttgatcgccttgatcgaatcgccctgcccggcctgcggggtcaggcgcagcgggtaggcactggtaaaccagccgacgctgcgggtcaggtcgatgtcatcaaacaggctttcacggccgtggccttccagctggatcagtgccgaagcatggccagtccagcggcacagcacacgggccagggcggtcagcagcaggtcattgacctgggtgcgataggcactcggggcctgttgcagcaactggcgggcgtgttcggcatccaggcgcacgctgacggtgtcggcatcgcggttgcgcaacgaaccgtgcgggcgagtcaccggcaaccccacttccggtccggccaattggtcctgccagaggctcaattcttcacgcagggattcgctgccggcatacgcctgcaaacgcgcggcccaatcacgcagggcactggtcttggccggcaggctgaccgattggccgtcactcagttggcggtagaccgtttgcaggtcttcgagcaggacgcgccaggacacgccatccaccaccaggtgatggatcgcgatcagcaggcgttgctgcccttcgggaccgtccaccagcaaggcgcgcagcagcgggccgtgttgcaggtcgaggctgcgctgggtgtcggtgaacagcgcggtgcactgcgccatatcacgcacttgcgcctgcatcagcacgccgccttccggcacggccagatgctcggcgtgccaccgcgcgtcgcgctgggagaagctcaggcgcagtgcatcgtggtgttccagcaccgccagcagcgcttgctccagacgatggggttgcagcagttgcaggggcttgagaaccagcgcctggttccaatgctgacggttagggatctcgttgtcgaagaaccagtgctggatcggcgtgaggcccgagctgccggtgagtacgccttgctcggcggtgatctgctcggagcgcgaggccacggcggccagggtttgcacggtctggtgctggaacaggtcgcgggggctgaaatgaatcccggcctgccgcgcacggctgaccacttggatcgacaggatcgagtcgccacccagttcaaagaagttatcgtccaggccgacttgctgcacattcagcaccgcacaccagatcgcggccaacgtctgctcaagctcgttgcgtggtgctacataggtctggcgattcgcctcgggatccggttgcggcaacgcacgccggtcgagtttaccgttggaggtcagcggcatgctgtcgagcacgatcaggtgtgcgggcaccatgtagtccggcagttgcgccttgagatgcgccttgagcgcatcgcgcaatgcgccgtgctcggcatcgctgaccaggtacgccaccagctgcttgccactcggcgaatccagcgccagcaccaccgcttcacgcacggattcatgttccagcaggcgggtttcgatctcgcccagttcgatacggaagccgcggatcttcacctgatggtcgatacgccccaggtactctaccaggccatcggcgcgttggcgcaccaggtcaccggtgcggtacaggcgcgcaccgttgctcgcaaacgggtccgcgacaaaacgctcggcggtcatgcccggacgctggtgataaccctgggccaggccggcgccaccgacgaacaactcgccggtcgccccttgcggcaccaatgccatgtcggcatcgagaatataggccacgcgctcaccgatgatgctcccgatcggtacgctggccgcgccctcctccaactgctcgggcgcgaggctggccagtggcatcaccacagtttcagtcgggccataggcgttgaagaacacctgcggctggaacgcggcgcggatgcgctgcaagtgttcgccggtcagcgcctcgccgccggtgatgcacatgcgtaccggcaacgtctgctgctgggtcgccagccattgcgccaactggctgccgtagctcggcgtaaagcccaggatagtgatgcgatagctgcggatcagcccgcagatttcttctgcatcccactggccctgggcccgcaacaccacctgcgcaccgctgagcaacggcaccaacaggcgctcggtggcggcgtcgaagttgatcgaatagaagtgcagctcacagtcgtccgggcgcatgccgaaccgctcgatcaccgccgcgcaatgcatggcgatttcaccgtgggccaccaccacgcccttgggcttgccggtagagccggaggtgtagatcaagtacgcctgatggtgcggcaggctgataaacggcagctcatcggacgggtagttggcgagtaccggcaaatcatcttccaggcaccagcacgccacggtcgccggcaattcgcccagcgcttcgaacatcgctgcgtcgctgagcagcaggccgatgccgctgtcttcgatcatgtaatgcaggcggtccagcgggtattccgggtccagcggcacataggcgccgccggccttgaggatcgccagcaggccgatgaccatttccagggaacgtggcagtgccaaccccacacgcacttgcgggccgacgccacgctcgcgcagcatccaggccaggcggttggcgcgggcgtccagttcgcggtagctgagggtcacgccggcgaaggtcaacgcgggcgcatcgccacgggctttcgcctgctgactgaacagcgtgtgaatgcactgatcaaggcggtgctcgcccgcttcgacgcccaggctgtcctgcaacgcgcgctgttccgtggcgctgagcaacggcaattcgctcaggcgctgctcgggactggcgatcagcgcttccaacagattgcgccaatgttccgccatgcgcgcaatgcgcggctcgtcaaacaaatcggtgctgtaggtcaggcagcaacccagacgatggtcaaggtcggtgacttccaggttgaggtcgaacttggtcgcccgcgcatcgttggccaggtactcgacggtcatgccagccagttggcggttctgctggaattcccagcgctgcacgttgcacatcacctggaacagtgggttgtaggccgcgctgcgcggcggttgcagggcttccaccaagtggtcgaagggcaaatcctgatgggattggccttcgatcacagtgtggcgcacctggtcgaacagttcagccacgttcatctgcccattgagctggcaacgcagcacctgggtgttgaggaacgcaccgatcagcccttcgctttccgggcggatgcggttggccacgggcgcgccgatgcgcaggtcggtctggccgctgtagcggtagagcaacacggccagggtggcggtcatggtcatgaacagggtcaggccgtgttcggcgttgaaagcacgcacgcgggcggccaggtcatcgctcaaatcgaagcggtacaactcgccccgatggctttgcacgggcggacgtggacggtcgccaggcagttcgagcagcggatgttcggtgcccagttgccgagtccagtaatccaactggcgctgacgttcacccgcttccatccactggcgctgccacacgctgtagtcgaggtactgcaccggcaacggcgccagcggcgacaggcgttcgtcgataaaggcttcgtacaacgcgctgagttcacgggcaaagatgtccatggcccagccttcggtgacgatatggtgcagggtcaacaccaggtaatgttcgcgctcggcggccttgaccaggcaggcgcgcagcaacggcccggtttccaggttgaacggcgtatgcgcctcgtgatcggccagttgctgcaagcgctgctggcgttcgctttcgtccaacgcggagaagtcctgccagtccatgcgcaggccggtctgcgtcgagaccttctgataagccacaccgtcgatactcggaaaggtggtgcgcagggtttcgtgccgcatgatcagcgcttgcaacgccgcctcgaaacgccccacgtccagcacgccacgcaagcgcgccatgccaccgacgttgtaggccgggctgtccggctccatctgccagaggaaccacatgcgctgctgggaataggacaacggcaccggctggctgcggtcgaccttggcgatggcggtttgttggttgcgttgccccgacgcctggatcagcccgacctgttcggcaaaagcgcccaactcgctggcttcgaacaaggtgcgcaacggcaactcgacgtcacacgcctggcgggtgcgggagatgatttgcgtagccagcagcgagtggccgcccagggcgaagaagtcatcgtgcaggccgattttcggcagaccaaggacttcgcaccagatctcggcgatctgctgttgcagcggcgtttcaggctcgacgtgctcacgggtttgccacaccggctccggcaacgcgcggcggtcgagcttgccgctggggctcaacggcatggcgtccaggcgcatcagcagcgccggcaccatgtactccggcagttcggcggccagggcgctcttgacctgctgttcgcccagttcggcatgggcggtgtagtagccgatcaactgggcgtcacgcaccagtaccacggcctgggcgatgccgtccagggcgagcaggcgcgcttcgatttcctccggttccacgcggaaaccgcgcagcttgacctgttggtcgagacggccgaggtactcaagcacaccgtcggcgttccagcgggcacggtcgccggtgcggtacaggcgcgttccttggtggtcggcgacaaagcgctcagcggtcaacccaggacggccgaggtaaccccgcgccaggccgataccgccgatgcacagctcacctggcacgccaacgggcacggggttgagctgctcgtccagcacacggcagatcacattgcccagcggacggccaatcggcgagcgttcgccatcctcggcgcggcagtgccagtgggtcacgttgattgcggtttcggtcgggccatagcggttgtgcaattgcaccgccggcaactgggccaacacgcggttgcgcagctcggcaggcaaggcttcgccaccggagaacaggcggcgcaggctggtgcattcggccaccagcggttcatcgataaacagctgcaacaacggcggcacaaagtgcagcgtggtcacgccgtgcgcctgcaccaactgcgcgatgcggtgcgggtcgcgatgctcgccggggccggccagcaccaggcggcaaccgctgatcagcggccagaagcattcccacaccgacacgtcaaaactgatcggcgccttttgcatcagcacatcgctggcgtcgagttgataagtggcctgcatccactgcaagcgctcggccaatgccgcatgggtattgcccacgcctttgggctggccggtggaaccggaggtgtagatcacataggcaaggttatcgccgtgcaggtgcaggccgggcggctgggtcggccagctgtcgaggtgcaggctgtccatggcgatcacgcacacgccttctgcattcggcacttgctccagcagggcggtctgggtcagcagcaggtggacgccgctgtccttgagcatgtaggccaggcgttcggcggggtagtccgggtcgagggggacataggcaccgccagccttgatgatcgccagcaggcctatcaacagttgcggcgaacgctcggcggcgatggccacgcacacgtccgggccgacgcctttgtcgcgcaggtaatgggccagacggttggcctgggtgtgcagttgggcgaaggtcaggctgccgccgtcccagaccagcgcggtgtggtctgaagtctgctggctgagcaggtcgggcagccactgttgagccggcgcgcagggggcttcgctgtaacgcgcctgttcgtcgtgctgcatcagcatgaggtcgccgatggcttgctcgggctgttcgcagacagcgtgcaacaggttgatatagtgctcggccaggcgctggatagtcgcgttttcgaacagctcatcggcgtagtcgaacgacaggctcaagcgcccgttgcggtcctcttcggtgtgcagttgcaggtcaaacttggcttcacggctgtgccacggcagctcgtcggcgagcatacccggcaggcggcgcaaggcactgaggtcgcgttgctggtggttgaacatgacctggaacaggccctgttcgcgggcttgcgggaaagcttccaacagttgctcgaacggcaggtcctgatgggcctgggcgcccaaggccgtctggcgcgtggcggccaacagctcgttgaacggcaggcgcccatccagctccgcacgaagcaccagggtgttgatgaagaagccgaccaggccttgggtttcctggcgcgggcggttggcgttgggcacgccgatgcggatatcgcgctggccgctgtagcggtagagcaggctctggaacgctgccagcaacagcatgaagggcgtggattcgttggcctgggcggtctggcgaatggcttcgctgaggctcgcacccaagcgcacgctatggcgcgaggccgtatggcggtggtgtgccgagcgcggatggtcggtggccaggctcaggctcgggtgttcttcacccagttgcgttttccagtacgccagttggcgctggccttcgccttcggccagccattggcgctgccaactgccgtagtcggcgtagtgcagggccaggggcggcaacgccagagtctggccctgggcagcggcggcgtagaggcgtgagaattcatcgataaggatattcagcgaccagccgtcggcgatgatgtggtgcagggtcaccaacagttggtggtcttcatcgtccaggcgcaccagggtcacccacagcagcgggcctttttccaggtcgaactgggtgcgcgcttcgtcttcgcggatctgttgcgcacggccttcacgctcggctgcgggcaggtcgctgaggtcgatgatctgcaggtcgaaatcggccttggcagcgatccgctggaaagcctggccgtcgcgttcgtagaagcgcgtgcgcagggcttcgtggcgctggatcaactgctggaagcttgcgcgcaccgcgtcttcgtctaactcaccgcgcaggcgcagggcaccagggatggtgtaggcgctgctctgcgggtccagttgccaggtgatccacaggcggttctgtgccagggattggggcagttcctcgtgacgggacaggtggtggatcacgccttgggcgacgccgccatcctgctgcaattgcgcgacagtcgcggcaaaaccttgcagggtcggcgcttcgaacagcaggcgcaggctcagctccaggccaagggtttcacgcaggcgcgcgaccacttgggtggcgctgatggagttaccgccgagcaggaagaagtggtcatcggccgcaacggtcgcgacctgcaactgttcgcaccagatcgcggcgatctggttttgcaggtcggattccagcgccccagtgcgcgcctgcgcttgcagatcggggaactgcgcatagcggtcgaggctgccgtccttgtgacgaagcgcacacgccgcgcgttgcaccttgccgctggaagtcttcggcaacgcgccggggttgagcagtaccaccacgctcggcgcctcctggtacgcctcggcgacggcctggcggatcgccttgatcagcgcttcgggcggcaggattttctgcacgctgcggctgatttcggcggcaatgccgatgccttccaggccctgatcattcaccgcaaacgcggcgacccggcctttgcgcaccacttcgacttcgcgttcgatggtctgctcgatgtcctgcgggtacaggttgtggccgcgcacgatcagcaggtccttgaggcggccggtgatgtacacctcgccgtcccggataaaccctaggtcgccagtgcgcagccaggtacggccggcgtgttgcacgaaggtcttggcggtggcctcgaggttgcgccagtagccgtgggcgatgctcgggccgctggcccagagttcgccgacgtggttgtcgggcagttcggcgaggctgtgcgggtcagcgatcagcacagcgtgttcaggctggctggtgccgcaactcatgatcgcactgccctgccccggctcggcgcggttggcggccagggcctgctcgtcgacgcgcagcgcgggaatgccatggccacgagtgccaccggcgacaaacagggttgcttcggccaggccgtaggaggcgaagaaattattcggggtaaaaccacaggcggcgaacttctcggcgaagcgttccagggtgtcgatgcggatcggttcggagccggaatacgccacgcgccactggctcaggtccaggcgttccagggccgagtcgctgacccgctcactgcagaggcgataggcgaaatccggcccgccactgatggtgccgccgtattcgctgatcgcttccagccagcgcaatggccggccgagaaagtaggccggcgacatcagtacgcacggcacgccactgaagatcggttgcagcaggccgccgatcaggcccatgtcgtggtacagcggcagccagctgacgatcacgtcgtcggggtttaggtcgatgccgaaaccgcgccggatcagcacttcgttggccaccaggttgccgtggctgacttgcacccccttgggcagcgcggtggagccggaggtgtattgcaggaaggcgatgtcatcggggtgcaggtcgggggcggtccagtcgccagcgctctgcaaggtatcgacgctcaggaccggcggcgcgttgtcgatctgcgccaggccatcggcgagactggcgatggtcagcaacaggcgcggctcggcatcgctgatgatcgacagcaggcgctcctggtgatggcggcgggtggactccggcggatacgccggcaccgcgatcacccccgcatacaggcaaccaaagaacgccgcgacataatccgcgccgctggggaacaacaacaccgcgcggtcgcccagttcggcattggcctgcaacgcagcggcaatggtgcgggcgcgcaggtcgaggtcgcggtaactgagcacaacgctgtgctcggcggattcggcgaggaagcgcagggcaacctggtccggggtctgcgcggcacgacattgaagggactggaccagggtgcggggaagttcgaaggcgtccatcatggggttcctgcctgaaatcggcttacgggaaattcaacaattcggggggggttgttcagccgacggcgagtggccgcgccgcgtcgttgcgccagcgggccaggtgttcgtcggcgtagcgccgcacgcagcgcagcacggcgctttcgtgttgcacgaggaagaagtggtggccgtcgaacatgtccagggaaaagccgctggcggcgtcgagttgccagtcgagcaactggtcggcgcgcacgctgtcctgcttgccgccgaacacatggatcggcatgcgcagcggcgcacgctcgccgtaggtgaagctgccgcacagcaggaaatcggcacgcaggatcggcagcatcaactgcatcaactcggggttggccagggcttcttcggtggtgccttgcagttcgcgcaagcgggcaatcagttggtcgtcggtcttttcgatggcgtactcgctgacatcacgacgggctggcccgggtgtgccggaggcgaacaaggcgagcggcgccggcacaccacgagcgttcaaggcatgggccaattcgaaggcgagcaggccgccgaggctgtggccgaacagggcatagggaccgttcagatcgcggctgatttcatcggcgagctgcgcggccagggccttgatatcgcgttgcaacggctcgtccatgcgcatgccacggccgggcaattccagcgggcatacctgcaaccactcaggcagcgcccggcgccaacgcgcatacaccatggcgctggcgcccgaatagggcaggcagaacagccgcagtcgagtcagcgtactcatcgagtgacgactccaaactgaaacacgctgtatgcacgatagaaacccatttcgtcctcctgcgggtgctgatccttggccgttttactaacggacctgtcacccagaagaacggacggcaccggcaaataattagtcgccgggtacaagcgagacgtggttcacaccgaacaagaaagcataagattagttcgtcttctcatttgacaatcattatcattcagcataatttgttgcccgatgtgtaggaggccccggcaaggacgccctcccctaacctcttttgcgacaaggtgatttccatgacggaacaagtatccacaggcaggtgcgactcaccgcttctccaggcattcgtcgataaccggctgattctggtgaagatcgcggcccgcattaccggctgccgctcccgcgccgaggatgtagtgcaggacgcctacttccggctgcaatcggcgccgacgatcacctcatcgttcaaggcgcaattgagttatctgttccagatcgtgcgcaacctggccatcgatcactaccgcaagcaggccctggagctgaaatactccgggacggaagaggaaggcttgaatgtggttattcacggcgcttcaccggaaacctcgcacatcaatttcaacaccctggaaaacatcgccgacgccctgacggagctgccccagcgcacccgctatgcgttcgagatgtaccgcctgcacggcgtgccgcaaaaggacatcgccaaggaactgggcgtatcgccgaccctggtgaacttcatgatccgtgatgcgctggtgcactgccgcaaggtgtcgggcagccatagcgatacgtttgcgcgcagggtttgacacacctgagactcagggtgggagggggcttgcccccgattgcatggggccaatcaccggtgttgtgactgcacagatgccatcgggggcaagccccctcccacatgtggttcggtggtatgcctgtcagtccgcgggcatcacatcaatgcgatacggctcgaaaatcttcagcatctcgccatcgtcgcgcaaacgcttgagcaacgcggcaaacgcgtcccccgtgatcggcgctttcgggcgcaacaacgcgtagtggtgatacacctggtcgatgcgctccgagaccaggaactgccccgccatctgcgcattgcgcaccatgaaatcactcaggtacgagcgcgtcaccaaggcgatatcggcacgcccgcgcgcgaccatcagcaggttgctgtcatgggagtaggtcaacgtggcgttgaagtgctcggccatgtacttggggtcggggttgaagttggcgaaggcgtagtgataaccgctgaacaccgccaggcgtttacctctcaggtcagcgaaataactttggtcacgaccgggctcacgctgggcgacgaagatttccgcatcttccaggcccatgtcgaccgacgtgtgggcaatctcctgccagccccaggcagggttttcgaagatcgccatatccacgcggccctgctcgaaatcgcgaaaacgtcgcgggatggaggtgggcaccaagacaaattggtagtcggtttgcgcggcgttcagggcttcgaccagttgcggcagcaaaccggtgtcggcaccctgctccggtcgcacagtgtagggtgggaaatgcgccgcgccgatgcgtaccaattgcgcagccgaagccggcatccaccacgcggtgcccagtgcccaaaaggtaagtcctgcagccagccgccatggcgaaaacatcaaggcacgcaccgttcaaaaacgctcatggcgataagctaggcgtttttgtctggagagacaactttccagcggtaaattaatagcttgcgcctcaatcggccttcaaaaccatcagcagggcttcttcggccaactgctccagcgtcaggctgccctcggcgcgaaaccaggtggtggtccaggacagtgcgccggtgaggaaacgccgcgtgataaatacatccccacggatgtagcccgcatccttggcctcccccagcacttgcagccagagcgcctcgtacacatcgcgcagggccagcacctgggcctggccttcggccgacaacgaacgccactcgtacaccagcaccgccatggcctcgccgctgccgcccatgatcgactgcaattcgcagcggatcagcgccagcacgcgttcgcgcacgttgctcgcctcttccagcgaagcgcgcatcatcgcggtgttgtagtggatggtttcttccatcactgcgcgcaggatctcgtccttgctcttgaagtgatgaaagatactgccggactggatgcccacggcgctggccaggtcgcgcacggtggtacgttcgaagcccttgttgcgaaacagatgggccgcggtttgcagcagcttgccccgggcactgtcggggtcggtcaattgcccgccatcgaccatggtgcgcatgacccgcagggctttgtgctcatccatgcctctctcctctacttccacggacgtcttggcccgcaatttaggccgtggcggccacccaagcaagcgcttggctgaaacttgtatccgcagtttacaaaccaagcgcttgcttggtagtctcgaccccagccattcgaggaaggatttctcatgagcaagacggttcgtatcggctgtgccagcgccttctggggcgacacctgcaccgccgccgcccaattggtgcagggcggccagctggattacctggtgttcgactacctggcggaagtcacgatgtcgatcctggccggtgcgcggatgaaagatccccagaccggctatgccacggatttcgtcgaagtgctcacgccgctgctggccgatatccagcaccagggcattcgcgtgatcagcaacgccggtggcatcaacccccaagcctgcgccaccgccctgcaaacggcctgcgacaaagccgatattcccttgaaaatcgccgtgttgctgggcgacgacctgcaaccccaactcaaacacctgcatggcatcaccgacatgttcaacggcagcccactgccgccgttgtgcgtgtccgccaacgcctacctgggcgcacccggcatcagccaggcgctgaagctgggcgcggatatcgtcatcaccggccgcgtggtggacagcgcagtggtcagcgcggcgctggtgcatgaattcgactggtcctggcaggattacgaccgcctcgcccaggccgcactggccgggcatatcatcgaatgcggcgcgcaatgcaccggaggtaacttcaccgattggcgcgacgtaccggactacgagcacatcggctttcccatcgtcgaagtcagcgccgacggccaattcaccgtcaacaaggtcgacggtacaggcggcttgatcagcgaactcagcgtcgccgaacaactgctgtatgaaatcggcgacccgcacgcctacctgttgcccgatgtgatctgcgatttcagccaggtcaaattgcagcagcaaggcaacaaccaggtacgcctgcacggcgccaagggcttgccacctaccgaccagtacaaggtcagcgccacttacccggacggtttccgctgcaccgccagttgcctgattgccgggatcgacgcggtcgccaaggccgagcgggtcagccaggcgatcatcaacaagacctcggaactattcagccagcgcggctgggcgccttacaccgaagtgaacatcgaattgctcggcagcgaagccacctacggcgcccacgccaggcgccaggactgccgcgaagtggtggtgaaactggcggtgcgtcaccccaacaaacacgcactggtgctgttcgcccgtgagattgcccaagccgcgaccggcatggcgccgggcctgaccggcatcgtcggcggacggccgacggtgtacccgttgatccgactgttttcgttcctgatcgataaaacggcctgtgacctggccatcgacttccagggcgagcgccacccctgcgcactgccacctgccgacaccccgcgcctgcccgatgcgtccatcgatccgcccaagccccaaggtcgcgccgacgccagcgtgccattggtgaaactggccgtggcgcgctccggcgacaagggcaaccacagcaatatcggcgtgatcgcccgccatcccgactacctgccatggatcgccgaagcactcaccccgccagtgatcgtcgactggatgggccatgtgctcgaccctgtgcacggccgcgtcgagcgctggtatctgcccggcagccacagcctcaacttcctgctggaaaacgcgctgggcggcggtggcatcgccagcctgcgcatcgacccgcagggcaaagccttcgcccagcaactgctggatatcccgattgccgtgccgcaacacattgccgatcaactcgcataacaggagcgttgccgtggccttcgactcgatcttcaaagccaacctgttccaggggcaaaccgtgatagtcaccggtggtggcagcggcattggccgttgcactgcccatgaactggcggccctaggcgctcacgtgatcctggtgggacgcaaggcagacaaactgcagaacgtcgcgatagagattgccgaagacggcggcaacgccgattggcaggtgtgcgacatccgcgatgaagaggcggtcaaggcgctggtcaaacacatcctgcatgcgcacggtccgatccatggcctggtcaacaatgcgggcggtcagtacccctcgccactggccgcaatcaaccagaaaggcttcgaaaccgtactgcgcaccaacctggtcggcggtttcctggtggcgcgggaagtgttcaaccaatccatgagcaagcacggcggcgccatcgtcaacatgctcgccgacatgtggggcggcatgcccggcatgggccactcgggggcggcacggtcgggcatggacaacttcaccaagaccgccgcgttcgagtggggctatgccggcgtgcgggtcaacgccgtggcgccgggctggatcgcctccagcggcatggacacctacgaaggcgcgttcaaggcggtgattcccacgctgcgcgaacatgtgccgctcaagcgcatcggcaccgagtcggaagtcagcgcggccatcgtgttcctgctcagccccgccgctgcctttatcagcggcagcacactgcgcatcgacggcgccgccagcctgggcagccgcgcctggccgttgcacaaggcgcaggcgccgagcgaacccttcaacggcttccaccgcgcctacttgccggatgtgctcaaggcggagcaatagagcatgccagtgattgaatccctgatcgacgcccacagcgcccaattcgcgcaaaaccgcgaagccatgctggccgccatcgcccaactgcgtcaactggaagacaccctgctgagcaaggcgcaggacgccaagcccaagttcgacaagcgcggccaactgctgccccgcgaacgcctcaacctgctgctggacccgggtgcgccgttcctcgaactggccagcctggccggctacaagctgcacgacgacaaggacggcagcgccgccggtggtgggttgatcgccggcatcggctacgtcagcggcgtgcgcatgctggtggtggccaataacagcgcgatcaagggcggcaccatttcccccaccggcctgaagaaatccctgcgcctgcaacaaatcgccatggagaacaaactgccagtggtgaccctcgccgaaagcggcggtgcaaacctcaactatgctgccgagatcttcgtcgaaggtgcgcgcagcttcgccaaccaggcgcgcatgtcggccatgggcctgccgcagatcaccgtggtgcatggctcggccacggccggcggcgcgtatcaaccggggttgtcggattacgtggtggtggtgcgcggccgcgccaaactgttcctcgccggcccgccgttgctcaaggccgcgaccggcgaagtggcgaccgatgaagaactgggcggtgccgagatgcacgcacaaaccgccggcaccgccgaatacctggcggaaaacgatgcggacggcgtgcgcatcgcgcgcgaaattgtcggcctgttgccctggaatgatcgcctgccacagacgccgaaacgtgcctacgcagaaccgctgtaccccatcgaagagctgctgggcctgatcccggacgacccgaaaaaaccctacgacgtccgcgaaatcctcgcgcgcctggccgacggctcgcacttcctcgagttcaagggcgagttcgacgcccacaccgtctgcggccacatgcacctccagggccgcgccgtcggcgtgatcggcaacaacggccctatcacaccgaagggggcgagcaaggccgcgcaatttatccaactgtgcgaccagagccgcacgccgctactgttcctgcacaacaccaccggcttcatggtgggcaccgagtcggagcagcaaggcgtgatcaagcacggcgcgaagatgatccaggcggtggccaatgcacgggtgcctaaactgaccattgtggtcggcggttcctacggtgccggtaactatgcgatgtgcggtcgcggcctggacccgcgctttatcttcgcctggcccaacagccgcacggcggtgatgggcggtgcccaggccggcaaggtgctgcgcatcgtgacagaggccaagcaattgaaggacggcctggtgccggaccccaaggtgctggacatgctggaacaggtcactgcgcagaagctcgacagccagtccaccgcgctgtatggcagcgcgaacctgtgggacgacgggctgattgaccctcgggatacacggaccttgctcggttttctgctggatatttgtcatgaggctgaggtgcggccattgcagcccaacagctttggtgtggcgcgcttctaatcaggagaacaataaaaatgatcttcacccaagaacaccaggaactgcgccgcagcgtccgcgccttcgtcgaccgcgagatcaacccccatgtggacgaatgggaaaaggccgggcgctttcccatccacgatattttccgcaaggccggtgaactcggcctgctgggcatctccaaaccggagaagttcggcggcatgggcctggactacagctactccattgtcgccgccgaagagttcggcaccgtccgttgcggcggcattcccatgtccatcggcgtgcagaccgacatgtgcacaccggccctcgcccgcttcggctccgatgcactgcgcgaagaattcctgcgtccggccatcagcggcgagcaggtcggctgcatcggcgtctcggaaaccgccgccggttccgacgtggccgggttgaagacccatgcgcgcaaggacggcaacgactacgtgatcaacggcagcaagatgtggatcaccaactcgcccagcgccgacttcatctgcctgctggccaacacctccgatgacaagccgcacatcaacaagtcgctgatcatggtgccgatgaacacccccggcatcagcgtcagcccgcccctggaaaagctcggcatgcacagctccgagaccgcccaggtgtttttcgacggcgtgcgcgtgccgcaacgcaaccgcatcggccacgaaggtgcggggttcatgatgcagatgctgcaattccaggaagaacgcctgtttggcgcggccaatatgatcaagggcctggagcattgcatcgacagcaccatcgagtactgcaaggagcgccagacctttggcaaggcgctgatcgacaatcaggtcattcactttcgcctggccgaactctccaccgaaatcgaatgcctgcgtgcgctggtctaccaggccaccgagcagtacatcaaaggccaggacgtgacgcgcctggcgtccatggccaagctcaaggcggggcgcctgggccgcgaagtcagcgacagttgcctgcaatactggggcggcatgggcttcatgtgggacaaccctgtggcccgcgcctatcgcgatgtgcggctggtgtcgatcggcggcggcgccgatgaaatcatgctgggcatcatctgcaagttgatgggcaccttgccggggaaaaaaccatgaacaccttgttgctcgaaccccacaacggcgtgctgcacatcaccctcaaccggcccgactgccgcaatgcgatgagcctggagatggtcaatgaactgcgcgcggtgttggcgcagttggatgtccagacgcgcgcggtagtgatcagcggcgccggcggacatttctgcgccggggcggatgtgaaggacctagtcacggcgggcaatcaactgcaggcgctgaaccgggcgtttggcacgttgctgcaagaagtcgaagcgctgtcgcaagtggtgatcgtcgtgctgcaaggcgcggtgctgggcggtgggtttgggttggcgtgcgtgagcgatatcgccatcgccgatcaccaggcgcaattcggcttgccggagaccagcctgggcttgctgcccgcgcagattgcaccgtttgtggtcaagcgcatcgggctgacccaggcacggcggctggcgctgacggcggcacggtttgatgggcttgaagctgagcggctgggggtggtgcactttaccgagcgcgacccgcaggcgttggcgcagcggttggatgacgtgctggggcaagtgctgaagtgtgcgccgggggcgaatgggcgtactaaagcgctgttgctggccagtgtggatgaaccgctggaggcggtgctggatcggggcgcgcagtggtttgccgaggcggtgcgcagtgaggaagggattgaggggacgcaggcgtttgtacagaaaagaaagcctcggtggtgcaaatgacgccatcgggggcaagccccctcccacactgtgggagggggcttgcccccgatgaggcccgatcagacaccccatcagccaagggataaacccatgcccgccttcaacaaaatcctgatcgccaaccgcggcgaaatcgcctgccgcatccagcgcaccgcccaagccctgggctaccgcaccgtcgccgtctacagcgatgccgacgcccaagccctgcatgtgcagatcgccgatgaagccgtccatatcggcgcggcccccgtgcaacagtcgtacctcaatatcgaggcgatcctcgccgccgccagactcaccggcgccgatgcgatccaccccggctacggcttcctctcggaaaaccccgacttcgcccgagcctgccaacacgccggcctgaccttcatcggccccagcgtcgaggccatcgaactgatgggcagcaaacgcctgtccaaactcgccatgcttgacgccggcgtgccgtgcattgccggctaccagggcagcgcccaggacgacgccaccctgcaacaggaagccgggcgcatcggctacccgttgatgatcaaggccagcgccggtggcggcggacgtggcatgcgcctggtgcaccagccagaagcgctgctggacaacctgcataccgcccgttcggaagcgaaaaatgcgtttggcagcgacgaactgatcctcgaacaagcgctggtcgagccgcgccacgttgagatccagttgttcggcgacagccacggtcagctgatctacctcggcgaacgcgactgctcggtccagcgccgccaccagaaagtcatcgaagaggccccctgccccatcatgacggccgagttgcgccaggccatgggtgaagccgcattgaaggccgggcgcgcggtgaattacgtcggcgccggcaccgtggagttcctgctcgaccgtagcggccgcttctacttcctggaaatgaacacccgcctgcaggtggaacacccggtgaccgagttgatcaccggcctcgacctggtggattggcagttgcagatcgccgcagggcaaccgctgccgttgacccagtcggaggtgaccctgagcggccatgccatggaagtgcgcctgtacgccgaagacccaacccagggctttctgccgcaaaccggcgaggtactgcgctgggaaccggcggccggcgtgcgcatcgaccatggcgtggtgcagggccaacgtatcagcccgttctacgacccgatgctgggcaagctcatcgcccacggcgccacccgtgaagaagcgcggcgcaaactgctgcgggcggtggaagacacgctgttgctgggcgtcgcaaccaatcagcaactgctggctgacctgctcaagcacccggactttatcaacgacgatttcagcaccgggtttatcgccgagcacttcagcgagataccgcgtccttctgtgtcgagcgaacagctcgccctggccgctgcactgttctacacccacagtgccgagcaacatccccacggtctgtcgggctggcgcaacaacgccagtagcccttgcacctaccgccttgaggtcaacggtgaaatccacaccgtcagtaccgaacccctgctgctcagcgccgacggtcgccacgccaccctgatgctcaacggcatccgtcgacgcatggcctatcatctcgaaggcgaccaactgtggctacccggcctgtgcgtgaccaaccgcacccagcaagtggccagccgccaggccgatgccagcagcggcacggtcaaggcgccgatggacggcgccatcgttgatgtgcgggtcagcgccggtgatagcgtcaccaagggccaactgctgctggtgctcgaagccatgaaaatggagcatccgctgaccgccggcatcgacggcgtgatcaagggcgtgcaggtgattgccggtgaccaggtgcgcaatcgccaggttttactcgagatcatctagccccctaggcggaactacagggccgggctacgctctatccccaacagaaagggaagagtacgggaacctgcgcgatgcctcattggctgattattgaccttgaagccacaacggatgaaggcggctggcccgtgacggagatggaagtcatcgagatcggcgcaagcctggtcaaccgccagggccgcgagctggatcacttccagcgctttgtgcggccgctgcgccgccccttgctgacgcctttttgccggcagttgacccacatcacccaggcgaacattgatggcgcagtgccaatcactgaggtgtggccgttgttcgagcgctggctgggccagcaccaggcgcgcctggagggttgggccagttggggtgactacgatcgcaggcaactggagctggagtggcagcgccatggcctggccagcgccctcgccaccacgccccatgtgaacctcaagcagcgcttcgccaaggcccgtcgcctggacaagcccctggggctcaacggcgccctgcaattggcaggaatgcagttccacggccagcaacaccgggcgttggaggatgcgcgcaacacggcgcgcctgctgccattgattttgccggtctaggcagcttccctggccttgggcatactggccgacctttccagacccttttccgaggaatcgcccatgttcaaagtcaacgagtacttcgacggcaccgtcaagtcgatcgctttcggcaccgcagaaggtccggcgaccatcggcgtcatggctcccggcgaatacgaattcggcaccgcccagcgtgaaatcatgcacgtggtgtccggcgccctgaccgtcaagctgcctgacgccagcgactgggaaaccttcgccgccggcagccagttcaacgtgccggccaacagcaagttccaactcaaggtcgccgtggacaccgcttacctgtgcgaataccgcggttaagggtttcccggaaacaaaaaaatgcccgtctcctgcgagacgggcattttttatgggcttggaaagctattcgagaatggtcaccggcatgccgacttccaggcggccgatgctatcgttgaccaggttctggccgaagatcgcgccattttcagtcttgcgataggtttccagcgtggcgaagggttcacggtcagcactgcgttcgccggtctgcgggtcgatggtggtgaggatgcagcgcgagcagggctttaccgcacggaactccacatcaccgatacgcaggcgtttccagccatcttcggcgaaggcggtgctgccttcgatcaccaggttgggtcgaaaacgcagcatctccatgggccggccgatgcgttgcgaaaggtcatccagcgaagcctggccaatcaccagcagcgggtagccatcggcaaacgcgacctggtcatcgtccttgccataaccggcctcggtggtgcgggcgcgttcgagggggatctgcaccagccgcgtcggcttgccgataaagtcactgacccaggccgctgcctcgtcgcctgcgtccggcacccgcaaggtgtcgcgccagatggtcacaccgcgcaactcggcattaccgcccggcagtgcgacatccagcggcgtgtaaccgggcgaactcaaggtgagcccaccgttgcggttccacagtgccgacagttgactcatcttggccacggcgcgctgcgtgaggaagcgcccgctggcttcgtccaccagcatccagcgtcgatccccatccaccccgagcttatccaggccgacctgttgcaggatttcggccttgccggacttcaaggggtaacggtacaacgcgctgagacgaagcatgagcctgcattcctgaggggcaaagccatcaccctaaggtcatgcgggcacttcgtccagcatcagacgctggcgcaccacgtccaccagcttgtcgggctggaatttggacaggaaattgtcgcagccgaccttcttcaccatcgagtcgttgaagctgcctgacagcgaggtgtgcaacaccacgtaaaggctgcgcaggcgcggatcgttgcggatctcggtggtgagacggtaaccgtccatctcgggcatttcggcgtcggtgaaaatcatcagcagtttgtcggtcatcacatggccggcgtcggcccaggccttgagcatgttcaacgccttgaggccgtcactggcgatgtgcatcttcacgcccagttggccaagggtgtcgcgcagttgcgagagggccacgttggagtcatccaccagcagcacttcgcggccgcgggcgcgctccagcaccgggtcttcgagtttctcgcgggaaaccttggcgttgtacggcacgatctcggccaggactttttctacgtcgatgatttccaccaactggtcgtcgaccttgctgatggcggtgaggtaatgctggcgcccggcactggtcggtggcggcaggatggcctcccagttcatgttgacgatgcggtccacaccgcccaccaggaaggcctgcaccgagcggttgtactcagtcacgatgatggtgctgttggggccaggcaccagcgggcgcatgccgatggcctgggacaggtcgatcaccggcagggtctggccacgcaggttgaccacaccgcacacgaaaggatgacgctggggcatcagggtcaacttgggcagttgcagcacttcctgcaccttgaacacgttgatggcgaacaattggcgccccgccaggcggaacatgaggatctccaggcgattctcacccaccagttgcgtgcgttgatctaccgtgtcgagaatgccggccattaaaagctcctgatgcgctgaggaatttgtgcggttcacataaggtgagttatcggcggcgaacgccagaccttgacccccgtaaaatgccacgtaaatccattgatgtcacactgacatcatgctttactgcgctggcctctccgtatggcaagaaagcgacgttgcgcgacattcaattcgacgcaaggttccgctatgtaagggattcccctacgcacaatcaggcccaacctgatattcgcaatatctaatagccattaatgtgacgccattctcaatgcatgaatggagtcaggcttttgtttgccatcccaagccctcggcccacgggccttccagacatacagatgtcggcaatcgaaggtgtgcaattgacccctttcatgagggcagcgcacagccgttgccgtcactctaataaacgtcctactgaaaactcagaagccgcctacaggtcccagtcatatttcggcgctatttttaagccattcacccagtgcgacatctcatcacccgaccttatgttgtggagacttgtatgatgaacagcgcaaatgaatggcaaaccacactccccgagttcctgcttgaagcagaaacgctgctggccaagtcggaagagtgcttgagccacctgcacctgattcgcgacgacagcgacgccatcgactgcatgaagtccagcctggccaaactggccgaaaaggccgacagcctggccctgcaggtgatcagcgagttttcccggcatatccaatacctgatcgccaatgcggcaagcccgatgcaactgcatgaccaggcgctggatgcactgcatgcgtgcctgacgctactcgcgtggcaactggaactgatcgatgtgcgtaccggcgaactgagtatggacgagagtgagcaggcgacattgattgcaaccgtcacgctgcagatcccgcagaaggatttcacttataaaccgcagcagcgtgtgcaccacgcctcttgagtggataacaagtcgtattcgaacccgaagttatctaaaaacgacacgactattaactcgttggacttgaacagcgcagacaaagatatcaattagccattaacggtaataacgatacaaccaaacagaaataatataacttccccactccatgaactctgggaataccgcccggagcatttgcgcggtcaataatccggtgaggcacggcaccaggcgaccaacggtaacagtggtggtactatgccccgctcgaagtgactcaacttcatcatgcataaaaacgattcgataacgcattccaaacagagccccgtcagccgcagtgaccggacttcccgcagcgcaccctcattggctccatccgctatgtacgccagcctcaagacactcatcgcaaggtccgcgtcccgcagcaatgcacgccgtttgatcctcgccctgtgtcttggctcgctgctgctgagcctctggacctattccagctccgaaccgctgccgttgctggtgattgcgcttaacctggccactctcgtggtggtcggcctgcaacaatggcgttcacgcaagtccatcaagttccagccccaggaactggccgatcgcctgttgcaggtacaggaaaacgaacgtcaccgcctcagccgtgaactgcacgacgatatcggccaactgctcaccgccgccaagctgcaaagcgaatggctcaagcgtcgcctgcccgacgacctgcaagcccagtgctcggtgctgtgcaacaccctgaatgaaaccctggccaaggtgcgtgacgtttccgccatcctcaaccctcgccagttggccagcctgggcctggaagccagcctgcgtgcacacctgctcaagaccctggaaaacactccgatccactggagcctggaatgccagcaacggctgaccggaatcccggaagaaatggcagtggcggccttccgcatcacccaggaagcggtgaccaacatgctgcgccacgcccaggcgcgcaacctgctggtacgcctgcaacgcttgcccgaaggcctgtcgctgaccatctgcgatgacggccagggtttctcaccgtccatcaatcccggcctggaaggccaacggggcatggccggcatgtccgagcggatagatcagcttggcggtacgttgtccgtcagcagccagcccggcaatgggacacggatcgaagcgcttttcccctgggcgcctcgcgccctcgaacgggccagttcccctaaggttctcgagtgagctgcaaattactcctggtagatgaccatgcactgatccgggccggcgtacgcgcgctggtccaggatattcccggctacacggtgatcggcgaagccagcgatggcgcgcagttgctggagcagttcagcgccctgctgccggatatcgtgctactggacctgtcgatgaagcacaccggcggcctggacgccttgcagcaactcaagcgcgcctaccccaagagcaaagtgctgatcctgtcgatgcacaccgacccggaactgatcatgtgtgcgctggagtccggcgcccatggctacctgctcaaggacaccaccgccaacgagctggaacacgcgctgctggccttgcgcaacaacgagcgctacctgagcccggcgatcgcccacaccgtgatcaaccaggcgctggtgcgcagccaggggccgaccactcccgccggccacagccacaacctcacggcgcggcagttggagatcctgcgcctgatcgtgcgcggcaagtccacccgggagatcgcccatgggctgggcctgagcatcaagactgtggaagcccaccgctcgcagatcatgaagcgcctgcagattttcgacgtggcgggcctggtgctattcgcggtgcgcgagcagatcatcagcctggacgactagcggcgaatccaccggcaagtgtacgcgcaaggccttgggcaaggcctcgaagtgcagatcatcgccctccagcggctcgccatccaggttgatgtacaagccctgtgcgaccttgatattcacccacggcaggcgcgcccgcacaaacatggtgtccaggccccagccgttgctcatcaactcgcgcaaggtgccgaccacttcctggggggccggcaggatgctgacgtccagcaggccgtcgtcggccatggcgcctggacatagctcatgcccaccgcctgcctggcgaccgttgccgatacccagggcgagcagctcgcctttccaatggaaatcggggccatccagctcggcgtaggcggcctttaactcgctgaatcgcgtcaaaccggtgaacagataggcggcgccgcccaggacttttttcaaatcctcggaggtgttggcggtgacctggctgccgaaaccgccggtagccatgttgaggaagatctgcccgccgacctggccgaggtcgatggccctgggtggcacgtccagcagcgccagcgcctggtcaggctccaacggtacgccggcggccttggcgaaatcgttggcggtgcccaggggcatcagcaccaggctggcttcggtgttggcctgagccatggcttcggccacgtcgcgcagggtgccatcgccaccaccggcgatgatgtgggtgtagccgtcggccagggcttcgttgaccaggcgctgggcgtcgccaccttcccaggtgacccgtacggccaactccccaccctgctcgcgccgggcctgcacggctgaacgcacgtcctcgttgagggcttgcttgccgtggaggatcaacagggctttgggggtggtcattggggaatctcctgattcaaaggtgcttggagtatgtggaccttgggcggggagaaaaaagccattggatgggaaaaaaatcggatgattgagtacatatccgtttcttcggtaacggctgctatgggttccgctcttacagcggctcacttttgaacagcgcaaaagtaagcaaaacgctcttaccccaacactcggcacctcgcctaggctcggtgtgcccgtaattcgacagtgatttggggggccgccgccccgcgccatccatggcgcggggcggctaagatcaaaatcaaaagcaaagcgcggcggccgaatagccgaccgaatcgttgaagcgtacgcgctcccctgtaggagccgggcttgcccgcgaaggtcgttaaagatgacgcgggaaaccagaatgaacgcggcgcgctcactggttttagggctgcttcgcagcccaacgcggggcaagcccgctcaccacagtaaagcggttacacggaacaaaaaacgtatctgcgatgcgcagcgagtcgctcttgcttgtgatcttcggcgccccgtcaaacacgctggccgaacgcaggcttgaatccgtgggtaactcggcaggacgccgggttagccgcactgggccaaggatggcccattgcggcggcccacggattcaagccggagagagggcacaccgagcctacgcgaggtgccgagtgttggggcgaagcgtttttggttactttttgcgctcttcaaaaagtgacccgctgtaagagcggaacccatagcagccgttgccgcagaaatggatatgtacccaaaccccaatcaactcttatgcaacttactcatcaactgcgcctcagcctgcgtcaacccacacgactgcgtcagctcatccaccgtagcccccatccccaccagcttcgccgcctgcgcaaacgaaagactcgaaggatcgcgctgctcaatctgcgccagcttatccggcaacggcgcaagaatcgcacgcaactcatgcacctcgtccccgaccttcaccgcactctgctgaaagtgatcaacccgcttcaccaactccagcacccgccggtcacgcacagcatcacgctcagcctgctgtagcaacaactcgcgctgctgacgcacgtagcgcaacaggaatgccagggtcccggcccataacagggccaggacaatcaccgcggcctcaaggaacaatcagatgctctccagttccgaccactcttcttcgctcatcatcttgtccagctcaaccagaatcagcagctcgccgttcttgttgcacacgccctggatgaacttggcggattcttcgttacccacgttcggcgcggtttccacttccgattggcgcaggtagaccacttcggccacgctgtcgaccatgatcccgaccacttgcttgtcggcctcgatgatgacgatacgcgtgttgtcgttgacctcggtcggtaccaggccgaagcgctggcgggtgtcgatcaccgtcaccacgttgccgcgcaggttgatgatgcccagcacgtagctcggcgcacccggtaccggggcgatctcggtgtagcgcagcacttcctgcacgcgcatcacgttaatgccgtaggactcgttgtccagtttgaaggtcacccattgcaggatcggatcatccaaaccttgtgcggacgctgacttattcatacccctgaccccttcaagattggccacgcaccagcgtggaccttattgttcaatcaactgcgtttagtaaccggcatcgttttaaccgcgccactggcgatcaactcggccagttcggcgacgtcgagcaacgcgcacatgtgttcgatcacggtgcccgccagccaaggccgttggccccggtggctgcgccatttgatttcgttcgggtccaggcgcaacgagcggctgacttgatgcaccgccagcccccactcgtagccctgcaccgagatcacgtattgcaaaccctggcggaagtcgtcgcggtagcggtcgggcatgacccagcgcgcggtatccagcactttcaggttaccggcctggctcggcaggatgccgaggaaccactccggttgcccgaacagcggcgtcaattcctggccttccagggaatagatcgagcccaggcacaccagcggcaccgccagcgtcaagccggcgacgtcgaacaacaggcattcgaacggctcggcagcccagctcgggcgatcatcaccggtgaccggcggcggtgtgatgctcggcggcaggtgcacttccaccaccggctcgaccaccacgggggcaatcaccaccggagcaatcggcacgacgacaggcacaacctgcgcatcgcgggcctgttcttccaggacggccagctggaattcatccagcgtgctttccggttctacaacggcaggctccaataccaggatcggttccggcagcgcttcctcggtcgcgtcctgcagcagggcatccaggtaggattccagcgccagttgcggccgggtcttgagttcgacgggacggttcatcacgccacctgcgccacaagctgctgcgacagcaggtgtttgagcaacgcgcggtaggccagtacgccacggcttttcgcgtcgaactgcgacggcgccaggccggcgcggctggcgtcacgcaggcgcgtgtccaccgggatatagccgttccagatggtgtccgggtaggcatcgcgcaatacgcgcagggtgccgagggacgcctgggtgcggcggtcgaacaaggtcggcacgatgctgaacggcagcgcctgtttgcgcgagcggttgatcatcgccagggtgctgaccatgcgctccaggcctttgacggccaagtgctcggtctgcaccgggatcaccagttgctggctggccgccaaggcgttgaccatcagcacgccaagcaacggagggctgtcgatgatcgcgtagtcgaagtcctgccacagttgcgccagggtcttggcgatcaccaggcccaggccgctctgccccggtgactggcgctccagggtcgccagcgcggtgctggagggcagcagggaaatgctttcgttactggtgggcaacagcagttgcccgggcagatcggccggcacactgcccttgtgcaggaacagatcgtagttgctgtgttccagcgcatccgggtcgtagccgaaatagctggtcatggagccgtgagggtccaggtccaccacgaccacacgcttgcccgcctcggccagcaagccggctaaggcgatggaggtggtggtcttgccgactccacctttttgattggcaactgcccagactctcattcggttggttcctcccggcaggcacaggcgcgaccgagacattgcatggggttattgagccggcgacggagaattgacggcactctgtcgaaccggcggttttaccggggccggtgcagtttgtgtgccagcccgcttcaaggccgcatccggtgttgcattagcggtgccggtgccggtcaggctgcggcgcacatccaggttgcgcgacaccaccagcaccacccgacggttacgcgcgcggccttccgccgtggcgttattggccaccggctggaactcgccgtagcccacggacgccaggcgaccagggttaacgccctgcatcgcgagcatgcgcacgatgcttgaagcgcgggccgaggacagctcccagttggtcgggtactgcgcggtgctgatcgggaaattgtcggtgaagccttcgacatggatcgggttttcaaatggcttgaggatcgccgccaccttgtcgatgatggtgaacgcctggtcactgggcaacgcatcggcactggcgaacagcaggctggaattgagttcgatctccacccacagctcattaccgcgcaccgtcatctggttggagctgatcaggtcgccaaacgccgcgctgatgtcgtcggcgatgcttttcagcgggtcgctggtgccgcccacgccggcagcggtttcatcgctgtcgttgaccagcggcttggccggggtcacggtcttgggcctctcttcaccgatgggaatcggcttgagcgcacggtcggcgtcgttgaacacgccgatcagcgcctgggaaatgactttgtacttgccttcgttgatcgacgagatggagtacatcaccacgaaaaacgcgaacagcagggtgatgaagtctgcataggacaccagccaccgctcgtggttgacgtgttcttcaggctcgcgacggcgacggctcacaatacatacctcccatcaatccatgaagccctggagcttcaattcgatggaacgcgggttctcgccctcagcgatcgacaggatgccttcgagcagcatctcgcgataacgcgactggcgcatggcaatcgacttgagtttgctcgccaccggcagcagcaccaggttggcactggccacgccgtagatggtcgcgacaaacgccacggcaatgccgctgcccagttgcgatggatcggcgaggttgcccatcacgtggatcaggcccatcaccgcaccgatgatgccgatggtcggcgcgtagccgcccatgctttcgtagactttggcggcgttgatgtcgcggctttcctgggtgtagaaatccacttccaggatgctgcggatcgcttccggctcggcgccgtccaccagcaattgcaagcctttgcgtgcgtagctgtcgggctcggcatcggccacgccttccaggcccagcaggccttccttgcgcgcggtgaggctccagttgaccacgcggtcgatgccgccgggcaggtccacgcgtggcgggaaaatgatccatatcagaatctgcatggcgcgcttgaacgagctcatgggcgattgcaacaacgccgcgcccacggtgccgccgatcacgatcagcgccgccgggccgttggccaacgcaccgaggtgcccgccttcgaggtagttgccgccgatgatcgcgacaaacgccatgatgatgccgatcaggctcagtacatccatcagaggcaggcctccaccagatgcttgccgatgtcgtccaggctgtagacggcgtcggccaggtccgccttgacgatggccatgggcatgccatagatcacgcagctggcttcgtcctgggcccagatggcgctgccgccctgcttgagcaggcgcgcaccttcacggccgtcggcgcccatgccggtgagcactaccgccagaactttgtcaccgtaggacttggctgccgaaccgaaggtgatatccacgcacggcttgtagttgaggcgctcatcgcccggcaggattttgatcgcgccacggccgtcgaccatcatctgcttgccaccgggggccagcagcgccaggccagggcgcaggatgtcgccatcctcggcttccttgacgctgatgcggcacagcttgtccaggcgctcggcgaaggccttggtaaacgccgccggcatgtgctggatcaatacgatcggcgccgggaagttggctggcagttgggtcaacacgcgttgcagcgcaaccgggccacccgtggaggtgccgatggcgaccagcttgtaggccttgcgcttgggtgcgggcgaatgagccgacgccgcaggtgccagcgtgcgagcgggtgccactgcaggccgtgtcactggcgcaggcgcagggcgcgcaaacgacgacgtcggtgcagcgggagccggtgctggcgcagcggttggagtaggcgtgctgaacaggctgcgacggttactgcgcgaaatgctgtgcaccttctcgcacagcatctgcttgaccttctcggggttgcgcgagatgtcttcgaaattcttcggcaggaagtccaccgcaccggcgtccagcgcatccagggtgacccgggcgccttcgtgcgtcagcgaggaaaacatcaggaccggggtcgggcagcgttgcatgatgtgccggactgccgtgatgccatccatcatcggcatctcgtagtccatggtgatcacgtccggtttcaacgcaatggcttgatcaatcgcctctttgccgttggtggccgtgccgaccacctggatcgttggatcggcggaaagaatttccgagacgcggcggcggaagaaacccgaatcgtccaccaccaggaccttgactgccataaacactccgttaggcggggcgggcactaccgccctgccccaccagaatcaaatacgccgagcggcgtaacgcttgagcatgctcggaacatcgagaatcagcgcgatccgaccgtcaccggtgatggtcgcacccgacatgcccggggttccctgcagcattttgcccaaaggcttgatgaccacttcttcctggccaaccagttgatcgacgacaaagccgatgcgctgggtgcccacggacagaatcaccacatggccttcgcgctgctcttcatgggccgccgatgccaccagccagcgcttgaggtagaacaggggcaatgccttgtcgcgcacgatcaccacttcctggccgtccaccacgttggtgcgcgacaggtcgaggtggaagatttcgttgacgttgaccagcgggaaggcgaacgcctggttgcccagcatcaccatcagggtcggcatgatcgccagggtcaacggcaccttgatgacgatcttggagccctggcccttggtcgagtagatgttgatcgagccgttgagctggctgatcttggtcttcactacgtccatgccgacgccacggccggacacgtcggaaatctcggtcttggtcgagaagcccggggcgaagatcaggttgtagcattcggtgtcggtcaggcggtcggcggcgtccttgtccatcacgccgcgcttgaccgcaatgttgcgcaatatggtcgggtccatgcctttgccgtcgtcagtgatcgacagcaggatgtgatcgccttcttgctccgccgccaggatcaccttgccgccacgggacttgcccgaggcttcgcgctcttccggggtttccacgccgtggtcgacggcgttgcgcaccaagtggaccagcgggtcggccagggcctcgaccaggttcttgtcgaggtcggtttcttcgcccaccagttccaggttgatttctttcttcagctgacgcgccaggtcgcgaaccaggcgcgggaaacggccaaagactttcttgatcggctgcatccgcgttttcatcacggcggtctgcaggtcggcggtgaccacgtcgaggttcgacacagccttttgcatggcttcatcgccgctgctcaggcccaggcgcaccaggcggttacgcaccagtaccagttcgccgaccatgttcatgatgtcgtccaggcgcgcggtatcaacccgcacggtggtttcggcttcactggcaggcttctcggctgtcggcgcggcggcggcacgtgccggagcaggtgcggcggccggggccggtgctggcttggcagccggtgcaggtttggcggccggcgctggcgcagcggccttggcggcgaccggtgcagcggtcgccaccgctgcggccggggccacttcgctgaacttgcccttgccgtgcaactcgtccagcagggattcgaactcgtgatcggagatcagcccatcgcccgcaggggcggcgctggcagcagccggtgccgcagccgtggcggcgacttccggcaaggcgtcggccgcgaaggtgcccttgccatgcagttggtcgagcaatgcttcgaattcatcgtcggtaatgtcggtgctggcgctggccgccggtgcatccgcaggagcagcagcaggtgccacggcgtcggccgcgaactggcccttgccatgcaactggtcgagcagcgattcgaactcggcgtcggtgatgtcttcgctggtcggtgcggcgaccggggcagccggcgcttccgcctcggccttgacggcactgagggagttgagcagctgttcgaactcgctgtcggtcacatccggctcggcctcaaccacaggctccggtgcggcttcaaccaccggtgcggccgacgtgtcggcaggttccgccaggcgcgccagggcggccagcagttccggagtggccgccgtgatcggtgcacggtcgcgcacctcgctgaacatgccgttgaccgcatccagtgcttcgagaatcacgtccatcaactccgaatcaacgtgacgctcacccttgcgcaggatgtcgaacacgttctcggcgatgtggcagcactccaccagctcatggagctggaggaagccggcgcccccttttacagtgtgaaaaccgcgaaaaattgcattgagcaggttcgcatcatccggtcggctttccagctcgaccagttgctcggacaactgctctaaaatttcgccggcctctacaaggaaatcctgaaggatttcttcatcggcgccgaagctcatgtgggtgctccttagaagcctaaactggataacaggtcatcgacatcatcttgacccgatacaacgtcttcacgtttatcggcatgaatctgcggaccttcacccttggcgagatgtttttgtggatctttttccgagaggatcgcttcgcggtcatgttcgatgccggcgaaacggtcaacctggccagccataagcaccaatttgagcaagttgctttccacttcggtgaccaactgggtcacacgcttgatcacctgaccggtgaggtcctggtaatcctgggccagcagaatgtcattgaggttgctggaaaccgtgcggttttcctgctcgctgcgtgacaggaaaccgtcaacccgacgtgccaactcgcgaaactcctcagcccccacttcccggcgcatgaagcggccccagtcgtggctcagggcctgggcttcagtggccatgccgttgaccagaggcgtggcgttttccaccaggtccatggtgcggttggccgccgcctcagtcagcctgaccacataggacaggcgttcggtggcatcggtgatttgcgagatttcttcggcctggggcatatgcgggtcaatctggaaattgacgatcgcactgtgcagctcgcgtgtgagcttgcccacttcctgatacaggccgcggtcacgggtctggttgagctcatggatcaactgcaccgcgtcgccgaactggcctttttcaaggctgtcgaccaactggtgagcatgctttttcagggtcgactcgaagtctccctgtgacgtttctttatgctccatagctcccccgcgatggcattagccgtggatgcgttcgaagattttttcgatcttctctttcaaggccagtgcagtgaatggcttgaccacgtaaccgttgaccccggcctgggcggcttcgatgatctgctcacgcttggcttcggcggtcaccatcagcacaggcaggctgcgcagcttttcgtcagcgcgcacgtggcgcagcaagtcgataccggtcatgcccggcatgttccagtctgttaccagaaagtcgatgctcccgctgttgaggatcggaatcgccgtaatgccgtcgtccgcctcgaccgtgtttgtgaacccaaggtcacgcaacaggttttttatgatccgccgcatcgttgagaagtcatcaacgatgaggattttcatgttcttgtccaattcgacctccaagcagtcttaaacgcgcccagcacctggacgcgccatttcaatcaacaggcattacacaaaaaggactgccgggggcaccacgggtcgaacccgcgaaggccggttgccctcgcggtatcgtctgcagtgtccccacactgcctgttcagcgcgctcgccactctcccaagcgcccccgcaagcgggctgcgcactggctgtgcaactggctgacccgcgattcgctgacacccaggacctcaccgatttccttgaggttcagctcttcgtcgtagtacagcgccaacaccagccgctcacgctccggcaaattggcaatcgcgtccgccaacgccccctggaaacgctcatcttccaggtctcgcgatggctccatatgagcactcgcgccgtcctcgtgcagcccttcatgttcgccgtcctgcaacaggtcgtcgaaactgaacaatcggctgcccaaggtatcgttcaaaatcccgtagtaatcgtcgagactcaattggagttcggccgcaacttcgtgatctttagcgtcgcgaccggtttttgcttcaattgcgcgaattgcgtcactgaccatgcgtgtattgcggtgtaccgaacgcggcgcccagtcacccttgcgcacttcatcgagcatcgcgccacggatgcggatgcccgcatacgtctcgaaacttgcacccttgctcgcgtcgtatttggtcgacacttcgagcaagccgatcatgcccgcctggatcaggtcttcgacctggacgctggcgggcaggcgcgccagcaagtgataggcaatgcgcttgaccaggggcgcgtagcgctcgatcaactcgccctggctgtcacgggcagacttcttgtacgcgttgtagccggtcgctgtcatagcacgggtcctgcgctcgtctgatgcaccaatcgctcgacgaaaaactccagatgcccccgggggttggcgggcaatggccaggtatcgaccttctgggcaatagccttgaacgccagtgcgcacttggaacgagggaacgcttcgtagactgcacgctgcttttgcacagccttgcgcacacactcgtcgtagggaactgcgccgacgtattgtaaggcgacatcgaggaaacgatccgtgaccttggtcaacttggcgaacaggttgcgcccttcctgcgggctctgggccatgttggccaggacgcggaagcggttcatgccgtagtcgcggttaagcagtttgatcagggcgtaggcgtcggtgatcgaggtgggttcatcgcagaccaccagcaacacttcctgcgcagcgcgcacaaagctgaccacggactcgccgatcccggcggcggtgtcgatcaccagcacgtcgaggttgtcgccgatgtcactgaacgcctggatcagcccggcatgctgcgccgggctcaggtgcaccatgctctgggtgccggaggcggccggcacgatgcggatgcccccaggcccctgcagcagcacatcgcgcagctcacagcggccctcgatcacatcggcaagggtatgtttgggcgtcagccccagcagaacgtcgacgttcgccaaccccaggtcagcatccagcagcatgacgcgacggccaagctctgccagggccagggacaaattcactgacacgttagttttcccgacgccacctttgccgccggtcaccgcgatcacctgtacgggatgcatgctgcccattttatttctttaccttgtcttgcttagacgcaggctacatggcttggccgcgtgaatcgcttgcagaccatcgatgtagatacatttcacggtgttcataccgccctcaacctacccgcttcgccgggttgtggtagaggtcggcgaacatatcggccatcgcttcctcgctaggctcgtcttgcatttgcacgctgactgcacggctgaccaactgatgacggcgcggcagatgcagatcatccgggatccgcggcccgtcggtcaggtaggcgaccggcaattcatgactgatggccaggctcagcacctcgcccaggctcgcggtttcgtcgagcttggtgaggatgcaaccggccaggccgcagcgcttgtaactatgatacgcagcggtaagaacctgtttctggctggtggttgcaagcaccaggtaatttttcgacttgatgccacgcccggccaggctttccaactgcatgcgcaatgccgggtcgctggcttgcaggccggcggtgtcgatcagcaccacgcgcttgcgcagcagcgggtcgagggcgttggccagggactggcccgggtcgacatgggtcaccgacacattgagaatgcggcccagggtcttgagctgctcctgggcaccgatacggtagctgtccatgctcaccagcgcgatattctgcgcgccgtacttgagcacgtaacgcgccgccagcttggccagggtggtggtcttgcccatgccggcagggccgaccatggcgatcacaccgccctcttccaggggttcgatttcgggggtggcgatcatccgcgccaagtgggccagcaacatgcgccaggcctggcgaggctcttcgatttcggtggtcagggccagcaggtcgcgggacaacgggccggacaggccgatgcgttgcaggcgacgccacaggttggcctgttgcggtttgctgccttgcaattggttccaggccagcgaacccaactggacttcgagcagctcacgcaggccattgagttcaaagcgcatcgagtcgaacacacgctggtcaaccgccgctgccggggctggcgcagcgggacgcggcggctctttgaaggttggctcaaccaatggctccgcggcggtcagcggcaggccggcgaacaactggcgattggtggtggcatcgctgtcgccacgcatgctcagttcagcctgggccgaaacaatccgcgaagcggtcttgcgcagctcgtcttcgagctccatgttcggcacgcgcggcgccaaggccgaaggtgtgtaatccagggcagccgtcagctcgacaccgccggcaatacgacggttgccaataatcgcggcgtcggcgcccagctcatcacgaaccagtttcatggcctgacgcatatcggcggcgaaaaaacgcttcacttgcataacccactaccctcagccgttgggccctactgtcgcgacgatagtcacttgcttgttgtcaggaatttcctgataagccaaaacgtgcaaattcggtactgccaggcgcccaaaccgcgacaacatcgcccggaccgggcctgccaccagcaggatcaccggttggccttgcatttcctggcgttgcgcggcgtcgatcaacgaacgctgcagcttctcggccatgcttggctccagcagaacgccctcttcctggccttgtcctgccttctgaatactattgagcaatatttgttccaacctgggttccaaggtgatcacaggcagctcggagtcaagccctacaatgctttgcacgattgcgcgcgacaatccgacgcgcaccgaagccaccagggcggcagtatcttgactcttggcggcattgttggcgatagcctcggcaatgctgcgaatatcgcgcaccggcacctgttcggccagcagcgcctgcaacaccttgagcaactgcgacagcgacaggatgcccggcaccagctcttcggcgagttttggcgaggctttgccgagcaaacccatcaattgctggacttcttcgtggccgatcagctcgtgggagtgcttgtagaggatctggttgaggtgggtagcaaccacggtgctggcgtccaccaccgtgtaacccagggactgcgcctggctgcgctggctgatttcgatccacaccgcgtccaggccaaaagccggatctttggcggtaatgccgttgagactgccgaacacctgccccgggttgatcgccagttcgcggtccgggtagatctccgcttcggccaggatcacgcccatcagggtcaggcggtaggcgctgggcgccaggtccaggttgtcgcggatatgcacggtgggcatcaggaagcccaggtcctgggacagcttcttgcgcacgcccttgatccgcgcgagcaactggccgccctggttgcggtccaccagcggaatgaggcggtagccgacttccaggccgatcatgtcgatcggggtcacgtcatcccagcccagctccttggtttcctgggcgcgggccggggatggcagcagttcctgctggcgtgcaatctcctgctgggcctggaccttgaccgcattctgctttttccagaacaggtaggcaccgccggccgccatggccgccatgctcaggaaggacacatggggcatgcccggcacgatgcccatgatcgccatgatgcccgccgccacggccagggccttgggcgaggcaaacatctgccggctgatctgcttgcccatgtcttcggagcccgatgcacgggtcaccatgatcgccgctgctgtagataacaacagtgatggcaattgcgccactaaaccgtcaccgatggtcagcaaggcgtacaccttgcccgcatcgctgaaggtcatgccgtgctggaacatgccgaccgccacgccgccgatcaagttgatgaacagaatcagcaggccggcgatggcgtcaccgcgcacgaatttgctggcaccgtccatggaaccgtagaactcggcttcctgggccacttccaggcggcgtgacttggcttggttctggtcgatcaggccggcgttgaggtcggcgtcgatcgccatttgtttgccgggcatggcgtcgagggtaaaccgcgcgctcacctcggaaatccgcccggcgcccttggtcaccaccacgaagttgatgatcatcaggatcgcgaataccacgataccgaccacgtagttaccgccgatcaccacctcgccaaaggcctggatcaccttgccggcggcggcatggccgtcctggccgtgcagcatcaccacgcgggtggacgccacgttcagcgccaggcgcagcaaggtggcgaccagcaggatggtcgggaataccgcgaaatccagcggccgcagggcgtacacacagaccagcagcaccacgacggacagggcaatgttgaaggtaaagaacacgtccagcaggaacggcggcatcggcaacatcatcattgccagcatcaccagcaacaacaacggcacacccagattgccccgcgagaggtcagtcagggtgctgcgcgccgtgccgagcatttgagagcgatccaccagtattcctcgtgtcctttgaagcaaagttttgacgcggttgggcgtcctgaaggcggtattgcaagaagccttccaacttttgttttggaacgtcgatcgctatggacgcccacgttttttcggaaagaacacattttaaatgtgggagggggcttgcccccgattgcagcttgccagactaagagtcggtgactgacacaacgccatcgggggcaagccccctcccacacttggatgtgcgcgcagccggtactactggggaaatttctgacaaggttttgcggttgcccctaggaaactcgctctctagtctccgtacaccgctgcaaacgcagtggtcgggcgtcgcggcccggatttccaaagagcaaaagcactatcgcccgctttcagttgacgcttttttagcgtctactgtgcggcgctatggcggctgtgcgcgggataccttcgggtatgccgggttgctccttgaccggtccgcgaacctgcgcacagctgtcaccccatcgcgtcgcggcgatcagtggcagctccacttttaaggagcctcacaatgatcaaacccaccccaaatccccccatcagtctgtttaccgtcgtagacactctcaaaaccgaagacctgctggtcaacctcaccgaaaccctcgcctcggccgacgcgctgatgagtgattttgcgtttgaattggaagggccaaaacgcgaaggcgcgctgggtgttgcacagttgattgggctggcaaagctgcttgccgacagagtgctggaggacagcgagcgcttgatggcgtgatggcggatcgttcctgcactaccctgcgggaacgatcatcaagctcataggacgcggacgttctcggcctgagcgcctttggccccctgcgttacctcgaactctactttttggttctcttcaagcgtcctgaaaccgtcgcccgtgatggccgagaagtggacaaatatatcgcccccaccgtcttgagtgataaacccaaaccccttctccgcgttaaaccatttcaccgtacctgttgccattgccgttctcctgatatctcactcaaggacttgctggatgaccctgacctcggaggcatggacgccatcgggtcgatggatcatctgaaacgccacctgcacccccactgcaagccggacgccgcgcgaaccaatgaggtccactggaacggcctcgccgtccacgacaatcaaaccctttccagttgcctggtcataggatgtgacgatgcctctgataacccgattcaaaaccactctccctgcatctcatttacagcctgcgcgcagtgcatagggcaatagaaccgcgagcagcgcagtctggctactgtgaagtttgacaggtagacgccagttatcgacgagtggtagggagggcgacccggtgtcaggaatcgcggcgcaggtccggcggaatcggcagatccttgagcggatcgggccgcttgcccttgcccgcacggtactggcgaatctgatagacatacgccagcacctgggccacggctaggtacagcccggcggggatttcctggtcgaggtcggtggaatagaagatcgaccgcgccagctccggcgattccagcagcaggatgtcgttggccaccgcaatttcgcggatcttcaaggcggtaaagtcgctgcccttggccagcagcatcggcgcgccgcccttctccgggtcgtacttgagggccacggcgtagtgggtcgggttggtgatgaccacgtcggcgtcgggcaccgaggccatcatcttgcgctgggacatctcgcgctgcagttggcgaatacgctgcttgacctcggggcggccttcctggtccttgtgttcgtcgcgcacttcctgcttggtcatcagcagtttcttgtggctttcccacagctggatcggcgcatccaccgcggcaatgatgatcaacccggcggccatccacagtgcgctccaacccaccacctgcacgctgtggatgatcgccgactccagcggttcatgggcgattcgcagcaggtcgtcaatgtcggacgacaacaccatcagcgccacgaacaggatcaggatgaacttggccaacgccttgagcagctccaccagggccttggtggagaacatgcgcttgagcccggcgccagggttcatgcggctgaacttgggcgccatgctgccggcggcgaacagccagccgcccagggcgaccgggccgatcagtgcggcgagcagcaaggtgatcaggatcggctgcaccgccaggatcgcgatctggcccgaatgcaaaaggtaccggcccatggcgtcgggattgagcagcacctcgcggggcaaggtgaagttgtgtttcatcaactccatcaggtccagcgccaggccgccgccgtagatcagtaacgcgccggcgccggccatcatggtggcgacggtattgagctccttggagcgggcaatctcgcccttttccctggagtcctttttacgtttctccgtggggtcttctgttttgtcctgaccactctcgctctcggccatggctcagcgcgcccgtgccagatcacgtaagaactgcagggcgtcggtcgccagcggttgatactgattgagaatgtcggccaggccgatccagaaaatccccatgcccaacaccagggtcaacgggaaaccaatcgagaagatgttcagttgcggcgccgcacgggtcatcaccccaaacgcaatgttcaccaccagcaacgcggtgatcgccggcagcaccagcaacagcgaagcgcccaatacccagccgagccgtccgacgatctcccagaagtgattgaccaccagccccgaacccaccggcaaggtggtgaagctttcggtcatcacctcgaaggccaccagatggccgttcatggccaggaacagcaaggtcaccagcatggtcaggaattgcccgatcaccgccgccgacacaccgttggtagggtcgaccatggaggcgaagcccatgcccatctggatcgagatgatttgcccggcgatcacaaaggcctggaaaaacagcgtgagggaaaagcccatcagcgcgccgatcaggatctgctcggcgatcagcagaaaggcactgaggtcgatggcattgaccggcggcatcggcggtaacccaggcacgatcaccacggtaatcgccaccgcaaagtacaggcgtacgcggcgcggtacgagtgtggtgccgaacaccggcatggccatgagcatggccgtcacccggaacagcggcaggatgaaggacgccacccaggtgctgatctgggtgtcggtcaacgccagcaaggactgcatcgggtcagccgatcaactgcggaatactgccgtacaactgcaggatgtattccatgaaggtctgcaccagccacgggccggcgacgatcagggtgaccagcatcaccagcaggcgcggcaggaagctcaaggtctgttcgttgatctgggtcgccgcctggaacatcgccaccaacaggccgaccaacaggctcggcaccaccagcacggcgaccatcatggtggtcagccacagcgcttcacggaacaggtcgacggctacttctggcgtcatcgcgctataccccgccgaaactgccggccagggtgccgataatcagcgcccagccgtccaccagcacaaacagcatgatcttgaacggcaacgagatgatcagtggcgacagcatcatcatacccatggccatcagcacgctcgccaccaccaggtcgatgatcaggaacgggataaagatcatgaagccgatctggaacgcggtcttcaactcggacgtaacgaacgccggtaccaggatggtcaacggcgcctggtccggggtggcgatgtcggtgcgcttggacaagcgcatgaacagctcaaggtcactggagcgggtctgcgacagcatgaaatccttgatcgggccctgggccttgtcgatcgcgtcctgggcggtcattttctccgccaggtagggctgcagggcttgctggttcaccttgtcgaacaccggcgccatgatgaacagcgtcaggaacagggccatgccggtgaggatctggttcgacggcgtctgctgcaggcccagggcctggcgcaggatcgagaacacgatgatgatccgcgtgaagctggtcatcagcatgacgaacgccgggataaagctcagcgcggtcatgatcagcaggatctgcaggctgaccgaatactcctgcgcgcccgccgcgttggtgcccaacgtgatcgccgggatcgacaacgggtcggcgccgaacgccaatggcgcggccagcaacagcatgagcgtcaataaaacgcgcattacttcttatccttctgatccttgcccagcaactccatcaggcgctgggcgaattctggcgtggcggactgactctgatccacgctcaccggggtcttgagcacgtgcaacggggtgatgcggccaggagtgatgcccagcaggatctgctcctcgcccacctgcaccagcaccagccgatcacgcgggccgagggcgcgcgaaccgatcatctcgatcacctggccgttgcccggccctacccgctgcacgcggcgcatcagccaggccagcacgaatatcagcccgaccaccagcaacaggcccagcaccaactgggtcaattgcccgccgatgccactgctcaccaccggtgcggctaccgctgtcgcttgcgcggccggctcagccgcgagggcgctcaatggcagcgccagaaacagtcccgccatcgaatacttcatatcagcgcaacttcttgatgcgttcgctcgggctgatcacgtcggtcaggcggatgccgaacttttcgttgaccaccaccacttcgccgtgggcgatcagggtgccgttgaccagcacgtccagcggctcgccggccaggcggtcgagttcgatcaccgagccctggttgagttgcagcaggttgcggatgttgatttcagtgctgccgacttccatggaaatcgacactggaatgtcgaggatcacatccaggttcgggccatcgagggacaccggctcgttgtttttcggcacgctgccgaactcttccatgggcaggcggttgccggccggtgcggtggcggcgtcagcagccagcagcgcgtcgatatcgtcctggccaacatcgccggtttcttccagggcagccgcccattcgtcagccagggcctggtcttcggcggaagtgttttcgtgttcggtagccattacatgtcctcggcggagcaaacattcataaataggagtgaatcagcggcggttgatcggctcgaccacctgcagcgccaggttgcccttgtgggaaccgagcttgaccttgaatgacggcacgccgttggcgcgcatgatcatttcttccggcaattcgaccgggatgatgtcccccggctgcatgtgcaaaatatcgcgcaggcgcagctgacgacgggccacggtggcgctcagcggtacgtcgacgtccagcaggtcttcgcgcagggccttgacccagcgttcgtcctggtcgtccaggtcggactggaaaccggcgtcgagcatctcgcgcaccggttcgatcatcgagtacggcatggtcacgtgcaggtcgccgccaccgccatcgagttcgatgtggaacgtggacaccacaatggcttcgctggggccgacgatgttggccatcgccgggttcacttcggagttgatgtactcgaagttgacttccatgatcgcctgccaggcttccttcaaatcgatgaaggcctgctccagcaccatgcgcaccacccgcaactcggtgggggtgaactcccggccctcgatcttggcgtggcggccgtcgccgccgaagaagttgtccaccagcttgaacaccagcttggcgtcgaggatgaacagcgcggtgccgcgcagtggcttgatcttgaccaggttgaggctggtgggcacatacagcgagtgcacgtactcgccaaacttcatcacctgcacaccgcccaccgccacgtccgccgaacggcgcagcatgttgaacatgctgatgcgggtgtaacgggcgaaacgttcgttgatcatctccagggtcggcatgcgtccgcggacgatacgatcctggctggtgaggtcataacttttgacgctgccgggctcggcagccatttcggtctgtaccagaccatcgtcgacgccatgcaacagcgcatcgatttcatcctgggacagcaggtcttgcacggccatgtcgtgatcctactgcaatacgaagttagtgaagagcgcctgctcgaccacgactttgccgagctccttctgggccacttcctgcacgctggccgtaaccttctggcgcagcatttcctggcccaccggggtggcgagtgtgtcgaagctctggctggagaacagcatgacgaggttgttgcggatcacgggcatgtgcaccttgagggcgtccaggtccgcagcgttacgcgccagcaaggtgatgctcacctgcaagtagcgttgacgaccgttctgattgaagttggcgacaaaggccggaagcatcggttcgaagattgccggttgcttgacgttagtggcggtttcagcggcgggtgccggcttgctggcactgctgtgcatgatgtaccaagtgccgccgaccgaggcgccgatggccaggagcaggcccaggactatcaacaggataagcttgagcttgcctttgcctgcgggtgcttttgctgcgtcgtcgctcttcgccatgccaataatccgtcactattcggggattcatagatctacggaaaggcaagagcaagtgttatgccagagttgtctggtcatttgggaagagaggacaccaaaaatcaaatgtgggagggggcttgcccccgatagcggtgtatcagtcacccatgtttcagctgacacagcctcatgggggcaagccccctcccacatttcgtccggatcaggcgtagtagtcgaccgcactggagccgattacggttgaggtgaccggcgtcacggcttcagccacatcaaggtggttgccgctgtcgccattgtcaccaccgcgcccgccgctaccgctcacaccacgggtctgggcctgctgctgttgttgctcctgcccacgggactggtccgacacgttcacgtccacctggcccatgccctgctgggcaaacatctcccgcaagcgcccggactggctttccaacgcttcacgcactaccgggtgggcactcatgaagttgacctgggcctgttggtcggcggtcatgttgaccttgatatccaggcggccgagctcagcgggttgcaactggatctccgccgacttgaggttggcgctggacaggtacatcacccggttgacgatttcgtcggtccagccgctctggtgcatggccaatggtgcattggtcaccggtggcaaggcgttggcggttttcggcgtggccgcctgggtcaatgcggccaggcggttggcgaagtcatcgacacgggtgtcgctgctggcgttcttcaggtccttgagaccgtcttcgatcaacccgctgaaagccttgtcgccgccctggtcggtgctgtccttggtggcttgctggtcgaccatattggcgaggccagcggcgaaattctgcgcggcggtgggttgatcctgagtcggtgccggagcgctttttgcctgcgcctggctgctggccgatacgtgaccgccctgctccatcgccaggcgcacggctggcatggcatccaggggatcagcctccggatcgaacgcgggcttggcctcctcggtcgcggcgaccggcgccgcgaccactggctgggttttgtcatccttggcggtggtaacgggcgcgggtgtttcaaccggcaccggcacggctaccggggtgacggtggcaatcaatgccgggtcgaccaccgggtcggccggaggctgctgcaccagggtcgggtcggctggcgcgtcatcatccttgctggcgctgtcgtcggttttggccggcggcgtggcaggcaaggtattgccgctatcggcaacggctggcgtgctggcggcaggcttgtcattgcccgctgcaggcttggcgctggcatcggacgacttgcctgcggtgggtttggccgagctgtcgtcggtcttgaccgaaggtttggacgcctggttggcaaacacttgagcgaagccagggcccttgtcccgtgggtccgcagccgctgccggtgggttggcagagggcgcttgaggcttggccgcgggggcagcctgaaggagcgaattgggggcgactggcataggtaaaggtctccactgcatgggggtcggggatgcagtaactggaggtagagcaagagttgggccaggttttgggttttgtgtgtatatccattatttgggcaacggcggcttatggttccgcccttacggcggctcacttttgaaaagcgcaaaagtaagcaaaacgctcttgccccaacactcggcacctcgcccaggctcggtgtgcccgtaatccga

SEQ ID NO: 120 - DNA, 360103 bp, Pseudomonas nodulensis
  misc_feature (181656)..(181691): n is a, c, g, or t
  misc_feature (254014)..(254063): n is a, c, g, or t
  misc_feature (282429)..(282467): n is a, c, g, or t
  misc_feature (319932)..(319966): n is a, c, g, or t
caggctcatggtatctctcgtgtcccaaggcatgatgatttcccggcgaagtttatccgccgaaaagtgtccaccatgtccccgtacacccgtcaaccatgtgtccggtccatacaggcctttccaaaagtgacccgccgtaagggcggaaccataagccgccgttacataaaaaacggatatgtactcaatcaaacctgaaaccgctgccgctccgactcatacaacggcttcaccaacgcaaactcccgatcaatctgatcgaccagctcccccagatccccaaccgcagactcaaccgactcaacctccaaccgctgacacaactgcgccaaccgcactgccccaaggttcccactgctgcccttgaaactatgcgcaatccgccccaacgccttggcatcatccctggccttgcgcagcgcttcgacgcgtttttgggaatcatcgagaaaggtatcaagcagcttgggatactcgccttccatgacttcctgcaaacccgacaacacctccgggtccagatgtagatcaaccacttgctcgctccttgatcaagaatcggcggattatgccagagcctcccaggaaaactccacgcagacactgcgcccgccgtccgaccagcgtacatcgctgctcaattgacgcaccaggctcaagccccggcctgacagacggtcaatatcgagcggccgcgccagcatctgctccacgtcgaacccaggaccgctgtcctcgatgcgcagggtcatcctgccgccgacctcggtcggcagcacctgcacatgcacccgtatatagccgctgttgagttgtgccaggcggtcattacgcaggcggtaatactcggcaaacccttgggcgtcacgcttgagccgagaatccagacccagcacgccatgctccagcgcattggaatacagctccgccatcacgctgtacagcgccccgctctgctcccgcagaccatgaatctccagcagcagttgcagcaagtacggcaatgggttgtaacgcttcaacgtctcagcacgaaattcgaaactgactgaccaatccagcggacaagactggccactgtcggcatacaacggcccgctggcacgcagctgctggccggcgtgcagggtgatttccaccatgctcacgtcatcccgcgcttcgccccggaacgccgccagggcctgctcgatatcttcaaacagccgatccggctcacggttggcagcgaacacctgctgcaagcgttcagcgccgaacagctggtcattggcgtcagcggtatccagcacgccatcggacaacaggaacactcggtcacccaaggccatgggccagacttcggtgcgatcatcaaaagcttgcgccgacagcacccccaacggcaaatgccgcgattccagtggcgtacgcttgccggtggcgatttcatgcacgtagccttcgggcatgccgccgttccacacctccaccacccgccgctgggtgctcaggcacaacagggtggcgcagcagaacatgtccaccggcaggatgcgcttgagcttggcgttcatctcgcgcagggtctgcgccaggccgtagcccttggcggtcatgccgtagaacacttccgccaggggcatggcgcccaccgccgccggcaggccatgcccggtgaagtcgccgagcagcacatgcatgtcgccggacggggtgtaggcggccaacagcaaatcaccgttgaacaacgcatagggcgattgcaggtagcggatattcggcgcggcattgatacaaccggaatgggcaaccttgtcgaacaccgccttggccacccgctgctcatgcagcaggtagtcgtgatgcttggcaatcaggtcgcgctgctgcaaaaccgtcgcctgcaaccgacgcagacggtccatggcgttgatcttcgccgcgagaatcagctgattgtagggcttggctagaaagtcatcaccgccggcatccaggcactgagccagcgcttcgctctcgcgcagggacgtgaggaaaatcagcggcaccagctcctcacccgccaattgcttgatccggcgcgccgcctcaaagccgtccatcaccggcatcagcgcatccatcaacaccagctgcgggcgctcacgggtaaacaccgcgaccgcttcagcgccgttggtggccgtgagcacctggtggccctggcgccggataatggtcgacagcagcaacaggtcggcggcactgtcttcggcgatcaggattgtcagcggctcaaggaccggggccaggacgctcaactgatgtcgaacagtttgtcgaagttggagataccgaggatcttgcgcacatccgaattgctgttgatcacccggatatcggcgtcatcgccggcatggtcgcgcagcagcaagagcatgccgagggcggagctgtcgaggtaggtcgtctctttcaagtccacgatgtaagtgttgggcactttgtagaagcgctcataggcttcgcgaaacgtctggtggctgccgaaatcgaaccggcccttgactgcgatcgtcaacttcgtcccatccagggatacttctgactcgactgacatgtgactgcttccttgtcattggcaatgacacaaggtttagcaggtgccggggatgtgggcaactttcaatagacgtctttgcgcggcatgcgctgcgaaagctcatccagcaacttctgctcgcgcttgtcttcaagcgctcgcgcttcatcgatatagcgctgcaccagcttgcgcaaaccttcgacccgggcaaacgcggcttgccagctctcacgtgccttgtcgaggttgttctggtgccaggccaggctttggcgctgctggccgacggcggtttccaactggttgagaaagccctggtaacccatcagccattggccggacacgcccttgctgccgcgttcgatccattgttgctggtactcgccgcgaaagcgctccaggtcgcccagcttgctttccgccaagcggacttgcccctggaagtaacccaggcgctgcacggcggttttctcggctttttcggccatgtccaccaccggagccaggcgcgcggcgcggctgttggccatggcttagccgcctggcgccggggcgaagatcgactgcaggtgcgcttcgctttcgcccatgctgatcttgtcgttgagaccctggcgcaagtaggtgaccaattgcggttgcagggcaatcgccaagtcggtgtcgcgatcaccgcccgccacataggcgccgacgctgatcagatcgcggctctgctggtagcgcgaccacagctgcttgaactgttgtgcacgggccatgtgttccggcgtgaccacggccggcatcacccggctgatggacgcttcgatgtcgatggccgggtaatgcccttcttcggccaggcgccgtgacagcacgatgtggccgtcgagcacgccccgcgccgagtcggcaatcgggtcctgctggtcatcgccttcggacaatacggtgtagaacgcggtgatcgagccaccaccggcttcggcgttaccggcacgctccaccagcttgggcagcttggcgaataccgacggcgggtaacctttggtcgccggcggttcgccgatggccagggcgatttcccgctgggcctgggcgaaacgcgtgagcgaatccatcagcaacaggacattcttgcccttgtcgcggaaatattcggcgatgcgcgtgcagtacatggcggcgcgcaaccgcatcagcggcgcatcgtcagctggggaggcaaccaccaccgagcgcttgaggccttcttcaccgaggctgtgctcgatgaattccttcacctcgcggccccgctcgccgatcagcccgaccacgatgatgtcggcctcggtaaagcgcgtcatcatgcccagcaacaccgacttacccacgccggtaccggcgaacaggcccagacgctggccacggccgaccgtcaataatccgttgatgctgcgaatgcccacgtccagcggcacgctgatggggttgcggttgagcgggttgatggtggggccgtccatcggcacccagtcttcggccttcatgccgcccttgccgtccagcgcgcgaccggcgccgtcgagtacgcggccgagcatgctcatgcccatcggcaggcggccggtgtcggccaacggcaccacgcgggcgccgggggcaatgcccgccaggctgcccacgggcatcaggaaaatcttgctgccggaaaagcccatcacttcggcttcgacctgcaccgggtggtagctgtcgtcgttgatcaccatgcagcgactgcccatggcggcgcgcaggccttcggcttcgagggtcaggccgaccatgcgcagcaggcgcccttcgaggatcggctggccgggcaactccgtggcctcggcgtaaccacccaggcgcttggcgaagctggtgcggtcaaggcgcatcgacggcgtccaggtctacgctcagatcaggctcggccgggtgcagggcctgttcgtggagctgatcaaagagcttggccatgatttggctgatgcgggtttccaccgtggcatcgatgcggctgtgttcggtttcgacccggcaaccaccgggctgcaacgccgcgtcttcgacgatgcgccaggtttcttcatggcgctcgcgcaaggctttgacctgctcgaaatcctgcgggttgatgtacagccgcacgttgccgacgcccaggggcagcagcttgagcgcttcgcgcatcacgctttcgatatggctggaatccagcaccaactcgcgctggatcacctggcgggcaatgtgctgtaccaggccgaccatggccttttcgatctgcgaatcctgctcggcgatggggtcgaacagcgtacccatcaagcgttccaggctggccagcttgacgctcagcgcctcttcggcttcctggcgcaccttgagggtggtgctgcgaaaaccatctttttcacccgccgcaaagccttcgttgtaggcctcctggcggatggcttccagttcttccagggtcagtggctggacttcatccagcggcacttcttccatttccaccggaagttcttcgaccggttccggctcgggctccggcacatgcgggtcgaagctgggcaacgaccagatgtcgaacccaccgacgtcccgtgcgcgaatcagatcgctgggcgcctcatctttgttcgacatgggaagcgccttagatcatttcttcgccgcccttcccgccgagaacgatttctccggcttcggccatacggcgggcaatggtgaggatttctttctgcgcggtttccacgtcgctgacacgcaccgggcccttggcttccaggtcgtcgcgcaacagttccgaggcacgcttggacatgttcttgaagatcttctctttgacgttttcgtccgagcccttgagggccagcaccagcacgtccgaggacacttcgcgcagcaacgcctggatgccacggtcgtcgacatcggagaggttgttgaacacgaacatgaggtcttcgatctggccggacagggtgtcgtcgatctcgcggatcgagtccatcaactggccttcgaccgagctgtcgaggaagttcatgatgtccgccgcacgcttgataccccccagggtggtgcgcgaggcattcgagttgccggagaactgcttctccagaatcgtgttgagttctttcagcgccgccggctgcacggtgttcagcgacgacacgcgcaggatgatgtccaggcgcactttgtggtcgaagtggccgagcacttcaccggcctggtcggggtcgagatacgccaccacgatcgcctggatctgcgggtgttcgtagcggatcacgtcggcgacggcacgcggctccatccatttcaggctgtcgaggccgctggtgttgccacccagcaggatgcggtcgatcaggccgttggccttgtcttcgcccagggccgaggtgagcatcttgcggatgtagctgtcggagccgacgcccaggctggtctggtcgccgacgatctcgacgaactcgctcatcacctgctcgacttgctcgcggtgcacattgcgcatctgcgccatggccacgcccacgcgctggacctctttgggccccatgtggcgcagcacttgggcggcgtcggtttcaccgagggacagcagcaggactgcggctttgtcgaccttggtgagcttggcaacagcggctcgattatcactcatctgcgttgatccactctttcacgacctgggccacacggcccgggtcttctgccaccagacttttgattgcgttcaactgagcgtcgtagccttcgctcgggcttggcaacaggatgctttgcgggccgccgaggctgacgcggtcgttggccagttcgccgtccaggccgcccatgccacccaactcgacgtcgctgccaccaaaggccgccagttgtttcttgccgttgccggtgatgttgttgagcaccgggcgcagcacgccgaacaccagcaccaggatgaacaacacacccagcacttgcttgacgatgtcccagaaccacggctgcgtgtagaacgcagggtcagcgatcacttcgccacgctcggcggagaacggcatgttgatcacgctgacgctgtcaccgcggctggcgtcaaaaccgacagcgtcctgcaccaggcgcgtgaagcgtgccaattcatcggcgctccagggggcacgggtaacggcgccgtcggcggcattgaccttgacctggtcatccaccaccaccgacaccgacaggcgattgacgcggccctgttgctgcttggtgtggctgatggaacggtcgagttcgaagttcttggtcgactggttacgcttgtccgccgggtacggcgcgagcatcggctggccagtggccgggtccatgatctgttggccattggcgtccagcagtggctggcctggctggatggcgccagcgctggccgtcgcgccgccggtggtttgcggggccgaggccggggccggtggctggttgctcagggcgcccggtacgccttggggcgggccattggcggcagtgcgttgttcgctggtggattgctcgctgcgcagcgccggctggtccgggttgaactgctcggaggtcgattcgacagcgctgaagtccacatcggccgacacttcagccttgtagcggtcgttgcccaacaccggttgcaggatgttgtgcacacgctgggtgagcatgctttcgacgcgacggctgtaatcgaactgcttgccggcctgggtcagcgcggagttttccgcctggtcggacagcaggttgcccttctggtcgaccacagtgatttgcgacttgctcagctcaggcacgctggtggcgaccaggttgacgatcgccagcacctggcctggctccagggagcggccggcaaacagttccaccaataccgaggcgctgggcttgcgctcatcgcgcacaaacaccgagcttttcggaatggccaggtgcacacgggcacccttgacgttgttcaggctggagatggtgcgtgccagctcgccttccaggccacgacggtagcgggtggcttccatgaactggctggtgccgaggccctggtccttgtcgaggatttcaaaaccgatattggcgtcggacggggtgacgccggccgccgcgagtttcatgcgcgcacgggccacgtcgtcggccttgaccagcagcgccccggagttgggttccacggtgtaggcgatgtcggcggcggccagggtttccatgatctgcttggaatccatgccggccaggcttccatagagcggccggtaatccggttgctgcgaccacagcaccacggcaaaaccaatcgccacgctcgcggccaggccgaccatcaggccgacctgacgcaacatggtcatttcggaaaggttttccaggaacgacaggccaaacagcggcggcttgccgtctgccttggcgggtgcgttgtccacgactgcttctgccatgacttaaatctcgtccttaaaccggcatctgcatgatgtcttggtaagcctgaaccagcttgttacgcacctgggtcaacgcctggaacgacacgctggccttttgcgaggcaaccatcacatcggtgaggtccacgccgcttttgccgatctcgaacgcgttggccaactggctggaggcttgctgggtatcactgactttgttgatggcctggccgagcatgtcggcgaagctgctttggcccaattccggcgctggcgcgacggatttcggttgagccatggcatccatttgcatggagcgcatatccaacatcaaccgattgaactcaataccctggctcatgaacttctctctccgacaaccgcatgttttttgacgctacgccgcaattactaggtgaagtagcaacaagggtgccagctctggttcaactcgtaagaaaaggcgacaaaccttgtccgccttgttaccgatcaggtggcgaacagatacgcctcgacgtccatgccggcgtcgcgcatctgcgccagcttgtagcgcaaggtccgcgggctgatccccaggcgctcggcggcctctttgcggcggccgcgctcggcgcgcagggtatcgatgatcatctggaattcacggcgacgcaggtcgtcacccaatgcaccggcggtttcggattcgacaaccacgggcgcaggcgccagggtcggcagcggcgcaatcccgctgcccatggccaggcagaaatcctggggctggatcaggccgccctgttgcaggatcaacgcacgctggatggcgttgtccaattcccgcacattccccggccatggataggcgaccaggcaggcctgggcctcggccgacaggcgtgcctgggcatgcttcatttttttgacgtgattgcccaacagccgctcggccagcggaatgatatccgccgggcgctcgcgcaacgggcgccaggccaggggaaagaccgagagacggtagaacaggtcttcacggaagcgccccgccgccacttcgcccgccaagtcacggttggtggtggcgaccacgcggatatccagctggattggcttgcgtgcgccaacgcgctccacttcgcgctcttgcagcacccgcagcaacttggcttgcaggcccaggggcatctcggaaatttcatcgagcaaaatcgtgccgccatccgcctgctcgaacttgcccgcctgggccgcgatggcgccggtgaacgagcctttttcgtggccgaacagcgtggcttcgagcatgttgtcggggatcgccgcgcagttgatggcgataaacggctgtttggcgcgggtcgattgctggtggatatagcgggccagcacctccttaccggtgccggactcgccggaaatcagcacggtggaatcactgcgcgccacgcgggccgccaattccagcaattgtgcgctggccggctcgaaggcaatcgggccttcgccgtcgctgggcgggatcacgcccagggcatgccgcgcgaccagttcgatcaaggctttgggctcgaacggtttgaccagataatccgccgcgccctggcgcattgcgtcgaccgcacgctcgacagcgccgtgggcggtcatcagcaacaccggcaactgcggctggcgcgcgcgcaacaggctgagcaactggtggccgtccatgcccggcatgttcacatcgctgaccactaggctgaaggactcctgctccaccgcctccaaggcgtcctcggcagaaccgaccgcccggtagtcatggcccgccaacagcagcgtgtcagccaatgcttcacgcagcgcgcgatcgtcttccaccaacagaaccttgatagccataacctcttactccgcgcttgccgcacatgaaaacagcggcaaggtcatcaatgcacaggtgccacgcccgacacgggaatgcagcagcaattctccctgatgggcgcgtgccactgccttgaccacggtcaggcccaggcccgtgccgttggtcttggtggtgaaaaagggttcgcccaggcgctgcaacacgacgggctcgataccgctgccactgtcgctgatgcacaggcgcagggtttgctcgcggctgtacaagtgcactttgagccgcgcaccggggccgctggcctgggtggcgttttcgatcaggttgagcagcgagccgacaagggtgtcgcggttgcacagcagctcgccgagatggctgtcgcactgccaacgcacttgcacgtcttgaatgtgagtggcggccgccgcttgcagggcctgcatcaactcggccggcgtgatgcggtcggtcagcggcaattcaccacgggcaaataccagcatgtcgcgcacctgatgctccaactcgtgcaggcgctccttgaggcgcccggcaaaacgctggtgggtggccgcaggcaattgctcatcagtcaaatgactggcgtagatcaacgccgccgacagtggcgtgcggatctgatgcgccagagaagcgaccatgcgccccagcgaagacaaacgctcgtggcgcgccaactggtcttgcaggtgacgggtttcagtcaggtcgttgagtagcacaagctggcccggctccgcgtccagggcgcgcgtggcaatggacaagcggcggccgtccttgagggagatttcatggccgtcgtcttcacgcggcgcaaagcagcgggtgatcacgtgacgccacagctcgccttccaggggcaggccaagcatgtcgcaagccgccgggttggcttcacgcacgcggccttcttcgtcgatgacgatcacgcccccgggcaacagcgacagcaggttttgcagacggttggccaggcgctccttctcggccaactcttccatgcgctgggcactgaccaccgccaactcgcccttgagctccgaaacacgggcttcgagcaggctgtaggaatcggtcaattggctggacatctggttgaacaacgaaaacgcctgctccaggccttggcggctttgctgttctacagagggaacgagccccgggatggcggggctggaagaatgttgggcggcgtggggcatcatgctctctcgcttggctgaccgtcagttaaacggaacgttgcgagggctgtagcaatacccgtgccgaaaaaaaaccgctgataaatcagcggtttgaaaaacaggcgtcaatcatccgcctgttcatcaccttctttgcggctcataccgtatttgcgcatcttctctaccagggtggttcgacggatgcgcaggcgctcggcggcacgggcgacgatgccgttggcgtcgtccagggcctgttggatcaggccttgttccaggttgccgaggtagtccttcaggtccaggccttcgggcggcagcatcgcggtagagccgaagtccggggtatgaccgttgatggccacccgttcttccaggtcgctgcgcaggctgtcgaccagttgctcgtcttcgtcgtcgacgtagcggaatttcttcggcagctcgaccacgccgatcacaccgtaggggtgcatgatcgccatgcgttccaccaggttggccagctcgcgcacgttgcccggccagccgtggcggcacagggacatgatcgcggcggagttgaaacggatcgagccgcgcttttcgtgttccatgcgcgagatcagttcgttcatcagcagcgggatatcctccacgcgctcacgcagcggggccatctcgatcgggaatacgttgaggcggtagtacaagtcttcgcggaagctgccgacctcgatcatgctttcgaggttcttgtgggtggccgcgatgatgcgcacgtcgacgctctgggtcttgttgctgcccacacgctcgaaggtgcgctcctgcaacacgcgcagcagcttgacctgcatcggcagcggcatgtcgccaatttcgtcgaggaacagggtgccgccgttggccaactcgaaacgcccggcacggctggtgatcgccccggtaaaggcgcccttctcgtggccgaacaattcactttcgagcagctctgccgggatcgccccgcagttgaccggcacaaatggcccgtcgcgacgcttggagtgatagtgcaggttgcgcgcgaccacttccttgccggtgccggactcgccgaggatcagcacgctggcgtcggtgtcggccacttgctgcatcatctggcgcacgtgctggatggcacggctggtgccgaccaggctgcggaacaggttgggttcgcgatggcgaccgcgctcgcgggcctggtcatacatctcgcgatagacctgggcacggtgcagggagtcgagcaatttgctgtagctgggcggcatctccagggtggaaagcacgcggcggcgctggtcttccggcaggtcgacagaagaaatatcgcccatcagcaacacgggaaggaactcatcccaggtagacagtgtctttaacaagcccaaaacagcaccaggagcgtttaccgtcccgatcagcacacaaatgacttcacggctcgatgacaatgagctgaccgcctgctgccagtcatggctgccgcagggcagattttcttcgccaagaaaattcaaaatcaccgctaaatcgcggcggcggacgctatcgtcatcaatcagcagaattttggtttcacgccacatgcaatagcaacttccctagtaaaacttcctgccccagagtgagggcaatcgagacgcctgtacgactttgtaccttactagacgtctgaaatctgaaaacagcactagttaagtcaaaaatgctggcacagtcaaatatatgacgcgcccatcggaccaactgcggctcttcagccgaacagatggtaaacctttgacgcatttttcgcttggttgatctgcgacatctcttcgaaaatcgcctgccgctcacccgtcgtcacctcgagcaattgctggtaaaccgccagcagactctcaagcttttcacgcaacgcatcctcgtctaccggcgcttcgctgagcacctcgtcgatgacatgacgacagcccaggtccagttcgccgatggcgtcccagttgcggtccgccagcgcgcccatcagcgcctcgcgggtttcatcaatgcgttgcaatgcttggctcatgacgtgttcctcaaggccgcttggccttattgtgcagcgccttgtggcgcgccgatggcatcccagccttctttcacggtaatcagcaaacgggcgacttcgtcgatcatgtcggcgtcgttgtgcagattggcctccatcaaacggttggtcatgtacacgtacagaccttccagttgctgaacgtattccttgttgtcgcttttttccgcgctcaggccatcacgaagcccgatgaggatgtcggcggccttgcccagcatcaggccctttgcggcgatatcgccacgcgccaacgcacctttggcctgcgccatgcggtcgagcccgccctccatcagcatttgcaccaggcggtgcgggctggcttcggagatctgggcatgggaattgaccttctggtattggcgaagggctctcatgggattcatgtttctacctcgtgacaggcaacagcgagaagggttgcaataaccattatgtcgactgggtcgcaaaaaactttaacccgacggcactatgaagaacaaagcccaggtcaatggacctgggctttttcatcagccatcaatcagctgcttttctgggcgttactcagcgcgctgagcgtacccaggatactgctgctctgctggcgcagttgcgccaccagcgtatccatggcggtgtacttgcgggtcaaggagtcttgcatggtggtgaggcgttcatccaacgcaacttgctgcttgttgaggtctttaaggctgtcggacaacgacgttgaacgcgtcgccaggatcccggtggtggccttggcatagccatcggtcgccgccgtcaggcgcgcgagcaggccggtcttgccgctgaagatactgttgatatcggcagcgttggtcagcacagccttgtcccactgcttggcatcaatgctcagcgcaccggtgtcgcggtcagtcgtcacaccgaattgcgccagggacttcaaggtgccattgccggacagggcgttgaactcgttgcggatcgccgcctgcaaggtgcgcatggtcgagtcgccggtcaaggtggcggcgacggagttaccggcggcatccttggtcaccttggtctcggcgttcatcgccttgagcagggcgttgtaggtgtcgacgaagcctttgaccccggacttgagggcggtggtgctggtggagacggagatggtcaaagcattgcgagccgtagacgcggtatccgaaggcgtggtcaagggcgacacagagagcaacttgatacttacaccactcactgcatccgtgatgctgttggtcttggactctgcagcaataccgtcaatggtgtacttggcgttcttcggctcgctgaccaccgtgtaaccggtatcaatccccgagttgcccgacatcgtcagatcggaaccaacaccagcattggtggaggtcaggataagacgcgaaccgttggagtcggtgaggatgttggcactcaggcctgcggtgccgaactgcgagttgattgagtcacgcacctgttgcagggtcgcgccggccggcaccttcaggtcgaagttcttgcccgactggctgatcgtcagcgtcgttggggtggtgccactgttcacgaccgtcgactggccgccagtgaaactcttggtcgacagcttcgacggcgtcgccaactggttgacgaccagcgagaagctaccgctcgccgcaccctggttggccgtcatggtggcgaccttctcgtccgaagacgtaccggtcaagccactgaagctgttatcggtgcccatgctggtcagcgcaccccggaaggcgtccagggctgcctggatcttgccgatcgacgacagctgggtggttgccttttgcgactggaggttgatctgagcctgtttcggcgctcgctcggcatccaccagggatttcacaatcgcctgagtgtcgaaacccgaccccacgccggtaatcgttgtacccgccatcatctttctcctgttccggtggctgccgttatcttgacgactagcgcttcaagcggtgacagcaacaagtttcatgccagttcacgccttgtcgtcaaacaatacatgactggcgctggccagactctgtgccagtttcaaggccgtttccgaaggaatctgtcggatcacttcaccggtgtcggtggcaatgaccttgaccacaaccctatgggtggaatcgtcaatggaaaagtccaggttgcgctgggccgcttgtacgaattctttaatatctgtaaccgctttttccaggctgtccttttgggacgtgcccgcggttggcgcggccgcttcaaccttagtcttgtctttgtccgcaaccacaggtgccggagtgccttgaggggccaacggcggataagacaagttcagttttacactcatgtccatgcccaatctcctctgattggaaaagacgaaagggcacgtaaacgcgcccttccgtcattcaccacgcgtcgctattactgaagcagcttcagtacagcggatggcagttggttagcctgcgacaggatcgcagtggaagccgactgcagggtttgctgcttggtcagttcagcggcttcggaagcgaagtcgacgtcctggatggtggaacgagcagcggtgctgtttttctggatgttggacaggttgtctacagtgctggtcagacggttctgtaccgcacccaggcccgaacgggagctggagatggtagcgatagcctggtcgatcacggacacagcgttctgggccttggtggcgtcagtcacgtcagtttgcgatacggaggtcttggtcgaagcagccgaagtagcagcaccgaagacaccagtcacaccagcgccttccagggagtaacccttggcggagtccaggttcactgcaccggtagcgatgatgccgtcagccagggcagtggcagtgccgtaggtgcccgaaccgtctttggtggcaacagtgatggtgccggcagcggtcgaagcgctgaaggccaggttttcaccggtgtcggatttaaccgacagagtgcctttggactcgtcgtagttgacgctgatacccaatttggcggagttcgacttcagttggtcagccaggctggcagtgtcttttacgccaacgaacgtggtggcttggccgccaacggtcatggtgaacgaagctggagcggtagcagcaccggcgccgactacgaactgagcttcagtgctggcggtagcgctcaggccaccgacggcgccgttcagctgggcagcgatggttttagcggaagcagcagcagcaacagtgacgctgctagtctggccgttaccggtcactgcgattgcgccgccagctacaccagcacctggagtgatgccgatgctcttcacctgctgcgaaccgatattgttggcagcaacgttatccagggacaggttgatggtttcgttagcgttggcgccaacctggatcgacttggtaccgtacgaaccgtccagcagcttctggccaccgaaagtagtggtctgggcgatacgggtcagttccgaagtcagggcctggtattcgtcgttgttcgacttacggtcgtcggggctcagggagccggtagccgaggacagagccagagtacgcattttttgcagaatgtcggtcgaagcctgcattgcgccttcagcggtctgcgcgatggagataccatcgttggcgttctttacagcttgacccaggccgttgatctggctggtcatacggctggcgatacccaggccggcggcgtcgtctttagcgctgttgatacgcaggccggaagacaggcgctgcatggaagtggccagggcgccgccagctttgttcaggttgccctgagtagtgatcgaagcaatgttggtgtttactgttaaagccatgacgaaatcctcgttggatggatactgcggcttccggccctggcaaccgccgggtgtggcctgagaacctacgtaatagttatcgtcgtggtagccggttgcttgaggatttttttcgatttttttgctggcgtcgtgccaccccttgtaattcaagggcttacgcaggcaaaaaagcccgatttcattggcttttctggcgccaaataaaaaacgccgatgctctttcgagcatcggcgtttttttgtgctagcggttcaaggtgtcacgggcgatagagaatcgccgagccccacgacaggcccacaccaaaaccgctgatggccacgcgtttccaggtggcgtccatcacatgcttttccagcagcagcggaatgctcgacgacacggtgttgccggtctcgaccatgtccttgatgaacttgtccaccggcgcatcttcaaaacgacgcgccacggcgtcgacaatcgccgcactgccctggtggatgcagaaggcatcgatatcgtcggccttgaggtccgactcatcgagcagctcgtgcaaatgcgccggcaccttgagcaaggcgaagttgaacacctgccgaccgttcatgaagaacacaccgtcgctgactttaaggtgcggggcgccggaaccgtcggtgccgaacttggacttgccgagcaaccacggcgcgtcttcgcccatccaggtagccgtagcggcatcgccgaacagcatggtggtgttgcggtcttccgggtcgacgatcttcgaatacgggtcggcggtgaccagcaggccattcttcaggccagcggcttccatgaagcccttcatcgcgtagatgccgtagacgtagccggagcagcccagggaaatatcgaaggcggcgacgtgggtcggcaaaccgagcttgtcctggacgatggcggcggtgtgcggcaggccctcttcgtcgccgttctgggtgactacgatcagcgcgtcgatcgactcgcgcttcaaatccgggttgttggcaaacaaagcgttgaccgcctcgacacacagatcggaagtttcctgcgcggcttccttgcgcggcaggaacgccgacccgatcttgccaatgatgaattcttcatccttggcgaatttggcaccctgggcgtagttatcgatcccgtctgccggcacgtaactggcgatgctttttatgccaatcattgtggcttcccaatactaaatagctggagaacacccctgggactacgcccggagtgctgacaataaaggggataaccccataaaaatctcgctgaaagccgccacgtaaggaccctgtgacgacttatccttttcacacgatacagtgaagatgcgctttatgactcacaggtcactcaattgtgtgtgctttatgcaaaaccttcaaacaattaaaccccagaaacgacaacggcccgccgtgtttccagggcgggccgcttgacgtgaagccacttacatcttgttgaacaggctcaactgcgagattttcacgaaggccagctgggaggcttgcagcatggtttgctgcagcgccaggttgatggccgcttcacccatgtcgatgttggccagatcactcatcgtgctggtcgtggcaatgctgatgcttgagttctcactggcctggatctccaaggcattctgccgcgccccgacggaaccccgcacattgacgatctgggacatcgaattggccaggttggcgatggccgagttcatggcatccttgagcttgaccgtcgctgccgggttgccgtcggccggcgcctccagcgccttgcgcaactggcccagggtatccagcgcattctgggtcttctgggtattggcacccaccgagaactgatcgcctggctgcggcgggccgctgctcacgtcaaacgtcacgccggccgccgtcaccgtggtaccgccgccggtatcgccggtggcgatcgccttgctggcgctcgaatagggctgggcatacacctcataggccgtcgcgctggtgaacttgatgatcgccccgctgttggacgggaacgtgctggcatagtccgcctgattggtgacctgggcgccggtcaactgtgcgctcgacgcattgctcggcgtacgcgacacgctgaacgtgtctggcttggcctccaggctgaaggtgcggtccttgaccaacgcatcggagttggcgcccggcgccacgtcaccgaggttcatggtgatatcgaacttcaccccccgcagtgcaacgctggtgctgccttccttggtggcgtcgaacgtgccattgcccggtatctcggaagtcacgtcattgccgttcttgtcagacaccttgtattgcgtgctgctggtaaaggtcagcttgtaaggctggccgtcggcgaatttgttggcgtagtcgccgctcgatgtcaccagcccggccgagagcgccaccttgtggtcattgaccgtaggtggcacggtctgcgggttcggcgcaacccagggggcctgggtgcgaccggcgttagccgcaccttcaaggatggtcttgccggtatcacccgcgctgacattcagcgtattggaaatctgcaggctcagcggagtttcatcaccctggtagctgtaggtgccatcgttgttgcgcgcatacggcggcgtctgggtcttggagccggaaaacaagtagttgccggccgagtccttgctgttgagcaggcccaggacctgatcttcaatcgcaccgacctcactggcaatcgagcgacgatcagcatcactgccggcaccaccggccttgagtgccagctccgtggcacgctgcatggcttcactgatcgcacctaaaacactctcttcgttagtcagcgagtttttcaggctggtgatgttgcccgtggactgggccactatgtctttttgctgctgcagcatcaacaaccgcgccgccgccacaggatcatccgcggcggtctgtacacgcacgccggagctggcctggtcctgggccttgaccacacccgaatagttatccgaatacttggcggagctggtctcgaaatactgctgtgtagaaatacgcatcgtcccaggctcccttaaagactattgatcaatgtgctgaaggtttcttgcgcagccttgatgatctgcgacgacgccgtgtagtactgctggaacttgatcatatcgcccgcctcttcgtccaggttgacctgggacactgagttgcgcgcgttcttgttggcggtcagcaatgcattcgtcgcggtgctgtcggtaccggcagccgcagccttggcgccaacggtagacaccaacttgctgttggcccccaccaggctggtgccgccagtgccatcagcggccgtgccgatggttgccttggtctgcaggcttagcaggtcaagggcgttgcggttgtcggacttgccggaggcattgaacgagaacgtcgtgctgtcgccgttggccggcgaaccgcccaccgtggtgtcgaaactgaaactcttggccggcaccaccaaggcaccgttggcatcgcgcatcggcacgttgaccgtgaccttgttgccctgccccggaacaatgctgccggtgccgatcgggttgccctgggcatcattgagcgtgtacggctgggtgccatcggctgccggcttgccgaacaccatcttcaccggcatcgagtgttcaatacccgtgcgcaattgggcagtggcggcgccgccctggatatccaggggcaccgtcagggtcggcggggtaaacgtgccggtgccctggttggtcttactggcttgcccggataacggcgcagcaaaggcgatcttgttcggatccgtcagcaccgtgccaatgtccttggcaccattggcggtcggactgaccttgaagctgtccccggtggccatcggccccttgccatcgagcgccaaggtgaaaccatcgatcacggccggtggcgtggccgtgacgtcaaaggtccccatggccttgccatcggaacgcaccacggtgacgttgttcgggttggcgctgtcgctgaaggtgaccttgtaatcgaaattggtcagcttgctgctgtccttgatcgtcacgttcaggttgccggaacccgcgctgttgtcacccgaagcctggctgcgctgggcaatggcggcggcgctgttgatatccttgaacagcgagctgccgaactgactattgaggtcaaggccctggcccaactggttgttgatggtgtctgcggtggcgatggcaatgcggcccagatcattgatggcaggcatcagcgcatcggtgcgatagcgcaacagaccgccgatgctaccgccgctgagcacgttgcccaggtcgagcgactcaccgccgccaacgttgagctggatggtgaactggctggtgtcgttcttgctcggtacggcggaaatcgtgttggactggtcacccagtaccagcgactggccggaaccggtgctgacactgaacacgccattcttctcggtggcggtcacgccgaccaattcgttcagcgaacgcacggcttcggcacgtgcgtccagcaggttggccggggccgtgttcgacgagccctgcacctgggcgatctgcttgttgagcgaggcaatggacgaggtcagcttgttgacctggtcactcatcgagctcaactggccgttgatggtttctttctgctggcccagttgcgtagagatcgagttgaagcgattgctcagcgtctgcgccttggtgatcaacacctggcgggccgagacatcgctcgggttggccgaggccgtctgcacggccgagaagaactcactgagcacagccgacatgccggtggtcttatccgacagggtcttgtcgacggcgctgacctgatccaggtacgccttggcatcgctgttgagcgaggtgctgttctggtacgccgcgtcgaggaactcgttatacacccggcgcacatcggccagggtggtaccgctgccgatgtacacaccgccgtactggttcgccgcgctggcattctgggtggtctgctgacgcgagtaacccggagtgttggcgttggcaatgttgttactcaagaccgacagcgatccttgagaggcgttgagccctgacatcccgatactgagcaaactcatggttcagaccttataaatgtgtggttgcgccagcggcagcgtaattctggtaactgtccatcgttttggcgatctgcgaaatcttgctggcataggccgggtcggtggcgtaaccggctttttgcaactcacggacaaactgttccgggttgtcggccgatttgatgacttctttatagcgatcattgctttgcagcaaggtcaccaggtcatggaagctgtcctggtaggagttgtaggaacggaactgcgccgtttccttgaccatcgccccatcgcggaactcgctggtgatcgcacgcgcctggccgccctgccaactctggccggccttgatgccgaacaggttgtggctgctgctgccgtcttcggcacgcatcaccgatttaccccaaccggtttccagcgcggcctgggccaccaggtacttcggatcgacaccgatgcgcgcagcggccgccttggccatcggcaacatggtggcgacaaattcatcctgcgaactgaaggctttcttcgccggcgccaacggtggctgggctacggcgcggccgtagacctgcatgcgcccgctcggcacggcgaaggtgcgcgcgctgctgttgatcacgttgtcatcggccacgctgttgcgcagcggcgcgcttttggcgtcaatcgcgacaggtgcgttcggtacgatgccggccagcaggcgatcggtcagcttgctcggcaaggcgatacggcgctggttcatcaattccatgtcattgctgtgggacgccgcagcgccagcctgaggctcagcaacacggtaagcccacagcggacgctggccattggagcggcccagcggcccttcggcctgggtgcctgccgcaatctcggtcggcacatcgactttcttctcaggcgtggtgcctgccgggccctgcaaggtggcggcctgggcctccaccggcttgttcttctgcatctggcgcatcagcacgtcggccaggccgatacccccgccttcacgggacatcgaaacggccaactgctggtcgtacatttcctggtactgcttggccgccggcgtgttcatcgggttgtctttacccagcgcctcggtggccgaacgcatggacttgagcatttcgctcaagaacagcgattcgaactcctgcgcgaccttgcgcatgttgccttcgctgttcttgtcggcaccgaccttgagctggttaagccggttcaggtcggaataagaccccgagtccgccgtgctgctgatcccgctcttgcgcatatccatggccatggcctcagatcacgatcaggtcggcttgcaaggcgccggcctgtttcaatgcttcaaggatcgccatcaagtcgccgggcgctgcgcccacctggttcaccgcgcggacaatctcatccagggtggtgccggggccgaacttgaacatcggcttggcttcttgctgggcattcacccgcgaacgcggcaccaccgccgtctggccgttggacaatggccctggctggctgacgatcgggtcttcggtaatggtcacggtcaggctgccgtgggtcacggcggccggcgagaccttgacgttctggccgatcacgatggtaccggtgcgcgagttgatgatgactttggctacagcctggcctgggtcgacttcaaggttttccaggatcgacagatagtcgacccgctggcttgggtccagcggcgccgtcacgcggatcgagccaccgtcgatggcctgggccacgcctgggccgagcatgtcgttgatcttgtcgaccacgcgcttggcggtggtgaagtcggagcggttgaggttcaaggtcaggctgttgccttggttgaaaccacttggcacggtacgttcaaccgtggcgccacccgggatacgcccggccgacggcacgttgacggtgatcttcgagccgtcgcgaccttcggcgtcaaacccgcccaccactaggttgccttgggcgatggcgtagacgttgccgtcaatacctttcagtggcgtcatcagcaaggtgccgccgcgcaggcttttcgagttaccaatggacgacacggtgatatccaccacctggcccggcttggagaacgctggcaggtcggcgctgatcgacaccgccgcgacgttcttcaactgcacgttgcccgagcccgccggcactttgatgccgaactgcgagagcatgttgttgaaggtctgcagggtgaacggggtctgggtggtctggtcacccgtaccgttgagccccaccaccaggccatagccgatcaactggttggaacgcacgccggagatgctggcgatgtccttcaggcgttcggcctgggcgacagcgctcaaggaaagcaggagtgcggccgccatcagctgtttgaagttcaaagtggccacctagaaagggaacagcgggctaaggaagaaacggtcgaaccagcccggctgactcgcatcagcaaacgaacccgtacccgagtaggtaatgcgcgcatcggcaatgcgtgtcgacggcacggtgttgtcggtggagatgtcatcggcgcggaccatgccggcaatgcgcaccaactcatcgccggtgttgagggtcatccacttttcaccgcgaatggcgatgatgccgttgggcaacacgtcggccacggtcacggtaatcgaaccggtcaggctgttgccctgccccgccgcgctcttgccgttggtggcacggtcgccgctgtagccggcgctaaggctcaagtcaccactgcccaacgggttgttggtgttaggcactgcgccaaacaacgaggtcaggccgataccggtcttgctggtcttgcccacctgggagttggcgttcttgctggcctgagtcttctcgttcagggtgatggtgatgatgtcaccgacccggaacgccttgcggtcgctgtacaggttctgttcgaaaccggcctggtagatcgagccattgttggcggccgctggcaacggcgtgcgtggcaacaccggcgcatagtacgggtcattgggttttggcgtcggggcgacacagcccgcgagcacggtaatcccactcaatgccagaacagaaacatagcgattcatgacccttacctcacggtgttgcaggcgccctcaagagcgccccatagacttgattacagattctgcgttacgaacgaaagcatctggtcggcagtggagatcaccttggagttcatctcgtacgcgcgctgggtggtgatcatgttgaccatctcctcaaccgtgctcacgttggaggtttccagggtgctttgcagcgtggtgccgaaaccgttcaggccaggggtgccgatttgcggcgcgccgctggaggcggtttccaggaacaggttgttgcccatggcttgcaggccggccgggttgatgaagtcagcggtctgcaggttgccgatcacttgcgacgcggggttgccggccacggtgatcgacacggtgccgtcgttgccgacggtgaaggtcttggcgtcggctggaacgatcacggccggctccagggcgaaaccgttggcggtcacgatctggccgttagagtccaggtggaaagtaccgtcacgggtgtaggaagttgtgccgtccggttgcaggatctggaagaaaccgcggccgttgatggccatgtccagcggctggccggtttgctgcaggttaccggcgctgaagttcttctgggtgccgacgatctgcacaccggtacccaattgcaggcccgacggcagttcgctgtcctgggtcgactgggcgcctggctgcttcttgatctgatagagcaagtcctggaactcggcacggtcacgtttgaaacccgtggtcgacacgttggccaggttgttggaaatggtggtcaggttggtgtcctgggcggacaggcctgttttggcaacccatagagccggaagcatgctgttctccttcgtgcgcctgtttgttggcgctgcgccgcaaaattagtgtgttggatcagctcatctgcatgacgcgcgtcatggcctgatcgtcttctttagcgctgttcatcatcttgatgtgcagctcgaactgcttggaaagcgccagcaccgcagtcatttcttccacggcattgacgttgctcgcctgcaggaagcccgaggtcagcttgacgttcgcgtcggcctgggccggctggccatccttggtatggatggtgccgtcgaggcccttattcatgttcttcaggtccggctggaccagcttgatgcggtccacttcagccatcacccgcgggccttcgcccatggcgcggatgctgatggtgccgtcggaacccacttcgattttctgctggggcggcacggcaatcgggccaccattgcccatgatcggcataccgttgccggcgcgcagcacgcccaatgcatcaacgttcatgctggcgctgcgcacgtaggcttcgctgccatcaggggtctgcacggccatccagccatcgccgttgacggccacgtccaggtcacgaccggtctcgatcattgcgccaggggtgaagtcggtggccggacgctcagtcatggcaaacgcccgcgccggaaagctgtcgccgaacaccggcatcgaacgcgcctgctccaggtcacgttggaaaccattggtggaaatgttcgccaggttgttggcatgggccttctgcgccagagcattctggctggcgccggtcattgccacataaaggtacttgtccacgcttcttcctctttctgacggacgcttgccgcccaccgctgtactgatgaggcttaagcaatttgcgaaccaacttttgaaaagagggagaagtgcaggcggggcgggggtttgccgtgaggtggggggatttcagggttgagcgtgagtcgaaaaaacggcggactactgccgcctgcggcaagtcccgtccttgaaaacgacaaagatcaaatgtgggagggggcttgcccccgatggcggtggatcagccacatcacagctggctgacactctgccatcgggggcaagccccctcccacatggggttatttatcggtcttgaggatttcgtaatcgcgcagcttattcgcgatggtggtgtgcgacacccccagacgcttgcccatctgccgactgctgggatgctcggcatacaaagcttccagtaccgccttctcaaatcgcccgacaatctcatccaggccaccctccagcgaaaaatcgccaagcggctgacgcacgccataatccggcaaccggatatgctcggccttgaccgtcccgccgtcgcacaacgacaccgcctggaacagcacgttttccaactgccgcacgttgcctggccagtggtagtgactcaggcgctccatcgcggcgggcgccaacctgggcagcgggcaaccgatctgccggctggcctggtcgagaaagtgctcgaccaacggcgccaggccatcgaggcattcgcgcaatggcgggatatgcagggacagcacattgaggcggtggtagaggtcctggcggaattcgccacgggcgcacagctcggacaaatccacttgggtggcgcagatcacccgcacatccaggtacacctcttcatcgctgccgacgcgacggaagcagccgtcctgcaaaaagcgcagcagcttcacctgcaagcgcgcactcatttcccccacaccgtcgagaaacaacgtaccgcccgccgtcagctccagcaggcccagcttgccttcagccctggcaccctcgaaggcgccagggccgtagccgaacaactcggtctcggccatcgactcaggcaggccggcgcagttgagcgccatcaacggtgattgcccacgcgggctggccaggtgacaggcccgcgccagcagctccttgccggtgccggtttcgccttctattaatagcggcgcatccagcggtgccatgcgtcgggcttcgcgcaccacggcggccatgactctggagctttggaagatgctgtcaaagccacgcagttcctgcttgcgcacgttgtagatgcgctcaccgacgcggtcggcgcggtgcagggtcagcacagcgccggccatggcctcgctgtcgtcatgctcggaggattgcagcggcgcgatgtccgccaggaacacgtcgcccttgaccttgacccgcaggccgttgattcgcgacttgctcgcgcgcaccagctccggcaagtcaaagtcctcggcgtagcgcgacaacggaatgcccggcacctcatccacccgcaccccgagcaactgcgccgcggcgcggttggcagcgacgatggaaccgcccatgtcgatggacaacaccggaaactccagggcacccagcagtgcattgagctccatatgccggcgctcgctgggcatcagccctaccctctttacgccaaacaccccggcaatcgcctcgaattgcgggcgcagcgcctggaactgcatgttcaccagattcggacaaaacaggtagatggcattgccatgctcaccgccgacctcgcccttggcgacgttgacgccgtattccaccagcaggttgaggatgtcccgcaggatgccgatgcggttctggcagtgcactttgatacgcatgaagaggcccgaaaagtggggaggcgccgcgtctttttgtcgctgggcgcagatagtcgtcaagattatgtgacagccacagcgactttcccagcccaatgcagcggtcaacctcacaagcgtaacgaatagtttacgaaaagcagtaatttttcctacatagaggcgttttaaacagatggaatctggccccgcacgggttatcaataggctcatcgcaggacataacaagaacgaatgcctagcaggagagccgtatgaagcagacgcagtacgtggcccgcgagcccgatgcgcaaggttttatccactacccgccggaagaacacgcggtgtggaacaccctgatcactcgccagttgaaagtgatcgagggtcgcgcctgccaggaatacctggacggcatcgataaactcgacctgccccacgatcgcatcccgcaactgggcgaaatcaacaaagtgctggccgacaccaccggctggcaggtcgcccgtgtgccggcgctgatccccttccagaccttcttcgaattgctcgccagcaagcagtttccagtggcgacctttatccgcacccgcgaagaactggactacctgcaagagccagatattttccacgagatcttcggccactgcccgttgctgaccaacccctggttcgccgaattcacccacacctacggcaagctcggcctggcggccaccaaggagcaacgggtgtacttggcgcgcctgtactggatgaccatcgaattcggtctggtggacacccccgaaggtcgacgcatctacggtggcggcattctgtcgtcgcccaaggaaacggtgtacagcctgtcgtccgagcccgaacaccaggtgttcgacccgctggaagccatgcgtacgccgtaccgcatcgacatcctgcaaccgctgtacttcgtgctgcccaatctgaagcgcctgtttgaagtggcacaggaggacatcatgggcatggtcgagcgcggcatgcagttgggtctgcacgcgccgaagtttccaccgaaacccaaagcggcttgaaccttacatcttcaggccaggtgagtctgttccctggccgcgcgttgctttagggtgacgctactgatcttcaaacactcgaattcaggacaccatcatgaccaccttgaaccaagcccattgcgaagcctgccgcgccgatgccccgcaagtcagcgacgaagaactgccggtactgctcaagcagatccctgactggaacatcgaagtgcgcgacggcgtgatgcaactggaaaaggttttcctgttcaagaacttcaaattcgccctggcgttcaccaacgccatgggtgaaatctccgaagccgaaggccatcacccaggcctgctcaccgagtggggcaaggtcaccgtgacctggtggagccactccatcaagggcctgcatcgcaacgacttcatcatggccgcgcgcaccgacgaagtggccaaggacgccgagggccgcaagtaatgcacttcgatgccattggccgtgtacccggcgacccgatcctcgggctgatggacctgtacgcccaggacgccaacccgaacaaattcgacctgggcgtgggcgtctataaagatgaccagggcctgacgccgattccacattcggtgaagctggccgagcaacgcctggtggacacacagaccaccaagacctacatcggcggccacggcaatgccgcgttcggcaagctgatcagcgagctggtgctcggcgccgactccccgctgctgcgcgaccggcgtgccggcgccacccagaccccaggcggcaccggtgccctgcgtttgagcgccgattttatcgcgcaaaacctgccgggccgtggcgtatggctgagcaacccgacctggccgatccacgaaaccatcttcgccaaggccggcctcccggtcagtcattacccctacgtgggcgctgacaatcgcctggacgtggcggcgatgctcgccagcttgtccagcgtgccccagggcgatgtcgtgctgctgcatgcctgctgccacaacccgaccgggttcgacctgtcccaggatgactggcgccgggtgctgcagatcgtgcgcgagcgccagttgctgccactgatcgacttcgcctatcaaggctttggcgacggcctggaacaggacgcctgggcggtccggctatttgcggccgagttgccggaagtgctggtcaccagctcctgctcgaaaaacttcggcttgtacagcgaccgtgtcggcgcgctgatcgtctgcgcggcggatgccgagaaactgacagacgtgcgcagccaactggcgaacacagcgcgcaacctgtggtcgacgccgccggaccatggtgcggcggtggtggcaacgatcctcggtgatgccgagctgaaaaagcagtggagcgatgaggttgaagccatgcgctcgcggatcgcacacctgcgctccggcttggtggaggcgttggcgccacacggtctatcggagcgttttgcgcacatcggcgcgcagcgtgggatgttttcctataccggcttgagtgccgagcaggtgaagcaactgcgtgagaagcacagtgtgtatatggtgagttcgggaagggctaacgtggccgggattgatgccacgcggttgacgctgctggccgaagccatcgccgacgtttcccgctgacgaaacccggaataaatgtgggagggggcttgccccctcccacatttggcttgtgtgcaacttcagccggcgaccatctcggccttgagctgcgcctcttttgcctgcgcatccgccaaccgatacaactcgatactcccatcccagtgctcgatcaacgccgtgcatgactccacccaatccccgcaattgaggtaatccacctcgcccaccttgcgaatctccgcatggtgaatatgcccgcacaccactccatgcaactcgcgtttggtcacctcgtgggcgatggcttcttcgaaatcgctgatgaagttcaccgccgtcttgaccttgtgcttgaggtacgccgacagcgaccaatagccatagccatagcgcgcgcgccaatggttcagccagcggttgagcgtgagggtgaattcgtaggccgaatcgccgaggaacgccagccagcggtgatagcgggtgatcacgtcgaactggtcgccgtggatcaccaacagatgccgaccatcggccgtcacgtgaacggcttcgtccaccagctggatattgcccaggatcagtttggaataacggcgcaggaattcgtcatggttaccggtgacatagatgacctcggtgccgcgcttggccatggtcagcaggcgacggatcacgttggtgtgggcctggggccaatacatgccgccacgcagtttccagccgtcaatgatgtcgccgaccaggtagaccttgtcggcgtgatagcccttgagaaattgcgacagatgctcagcctggcaatcccgggtgcccaggtgcacatcggaaatccacagggtacgcacccgttgcttgcggctgggcttggtgaactcggcactggtcatgggcatccctcgacggtgttttcgcgagcttgcgccctggcgattaatagcccatgacaactgtgcgtcagtctgatgacagcgcctgccggccgcaaagcgttgtagactgccggcttgccgccccggagatcactatgggacccgccctcaccctgcgccattacctcgaagcgcccctcgcccacagccatgatcatgcgcagttggtgttcggcctgtccgggcacctggacctggaagtcgatgggcgtggcagccaggtccgcgaaagcagcgtgatggtgctgcccttctcggcccaccatgcgtgcggcagccgtgatggcagccggtgcctggtgctggatgtgcccaccgagcattgggtgctgcaatcgctgggcgaacatgccgacgccagccgccgcctgctcgaccaaccggcgcggctggccctggatacgcggcagagccagttggtgcaatggctggcgcaaagcccggtgcatgacccgctgatcgtccagcaaggggcggtgctgttgctggccagcctcaatcatccccaggcccaacccctgccgggacggcgcctgccgtacgcggcgttcaatgcgcacatcgagcgccaccttgcgcacccgctgcaggtggcggacctggcgcgtatcgccgacctgtcggtggcacgtttacacgcacgctttatcgccgaatgcgggcaaacgccgatggactacatccgcagccgtcgcctgcagatggccttggacctgctgcgcaaaacgccgctacccatcggtgaagtcgccgatcgcgtcggctacacctcgcaaagcgcctttgccgccgcgatgctgcgtgagttcggcgcatcaccgggggcattgcgccgcaacgcgtaggaagagtcctgcgataaaaaacgcgagccgcacgacagacatccacaccggcgccccactagactgcgcacttgccacccgcttgtctcaaggatcgcaatgactccccgctcagccctcggcgccctgcatatcggcgcattgatgtttggccttaccggcgtattcggcaaactcgcggccgcttcgccggccatcatcgtgtttggtcgcgcggtgtttgccgtggtggctcttgcggtgtttgcccggttcgccagcaacacggcgtggaagacactggaactgcgcgactggcgccggctgctggtgagcggcgtgttgctggcagcgcactgggtgaccttctttatcgccgtcaaggtggccggcgtggccgtcgcgacactgggcttcaccgcgttcccggcgtttaccgtgatcctcgaagggttgattttccgcgagcggatccgccccaacgaaatcgtgctggtggtgctggtcagcgtcgggctggtgctggtcaccccagacttcaacctcgccagcgaagccactggcggcttgctctgggggatcgcctcggggctgttgttttcactgttatcgctgaacaaccgcgccagctccggccgcatccccgcagtgcaggcggcgttgtgccagaacgtggtggtcgctgtttgcctgttgccggtggcggcaccggggctgaccgaagtacgggcaatcgactggctgtggatcggcttgctcggcgtgttctgcaccggcctggcccacagcctgtttgtcgccagcctcgcggtgatcaaggcacgcaccgcctcggtggtgttcgccatggagccggtttacggcatcaccgccgcctggctgctgtttgccgaaacgccgacgctgcgcatgctgctgggtggcgcgctgatcatcgtcgccattgtgctgtcggggttgatgggcagcgccagccaggccaaacagcccactgcaacggcctgatctatactttcaatatccgcaacagtcagcagtcgttcaacggataaccgacagctcgacgacagccagggtgtgttctgaagttgctgcaagcgagtggtcacaacctcaacgcgatgcgggagctttaccatggaaatgctcatcagcttattggtacagatcatcagcggggcggtcggcggcaacgtcgccggcatgaccaaacagagcctcgggaccgggctcaatacactgatcggtggtgtcggcggactggtgttgggtcaggtcgccgcggcattcacgggcacctcgggcggtgaagcgctggatgtagcggcagttggcagcaacattgtggggggtgggataggcggcctcatactgacgtggctggttggcttcatcaaacacaagatggccaccaaatagggctgcactagagggtcaccgcccccaataaggcggtgactttcactgcgtacggtcgttgtgccccaggtcacgctgcgggtcgatcctgtcgcgtacgcgctgcttgagcaccttggcttcggggaaaccaccgtccgccttgcgttcccagatctgcacgccatcgcaggtgatgcgaaacgcgccgccggtggccggctcgagtgagaccttgcccaggtcatcggcaaatgtactcaacagctcctgcgccagccacgcggcgcgcagcagccactggcactgggtgcaataggtgatgacgatctcgggtttgcttgtggacataacttgagaagctcctggcataacgggctcggcggatcgagtggctataataccggcctttatcgcccagccccgagattcctgatgcgccgcctgctgtcctgcctgttgctgtgcctgctccctctgcttgccgacgccattgaagcgccccgcccgaaaatcggcctggtgctgtccggcggcgccgcccgtggcctggcccatatcggcgtgctcaaggcgctggaagagcaaggtatccagatcgacgcgattgccggcaccagcatgggcgcggtgatcggagggctgtatgcgtcgggctacaagatcgatgagctggaaaaactggcgctgagtatcgactggcaacaggccttgtccgacgcaccaccccgcgaagacgtaccgttccgacgcaagcaggatgaccgggacttcctggtcaagcagaaactcagcttccgcgacgacggcagcctgggcctgccactgggtgtgatccagggccagaacctggcgctgctgctggaaagcatgttcgcccacaccagcaacacgcgcaatttcgacaagctgcctatccccttccgcgcggtggccaccgatatcaccaccggtgaaaaggtggtgttccacaagggccacctgccccaggtgatccgcgccagcatgtcgatcccggcggtattcgccccggtggaactggacggccggctgctagtggacggcggcatgaccgacaacatcccgctggatgtggcgcgggagatgggcgtggacatcgccattgtcgtggacatcggcaccccgctgcgttcgcgcaagcaactggccacggtggtggatgtgctcaaccagtccatcaccctgatgacccgccgcaattccgaggaacaactcaaggacctgcaccccaaggacgttctgatccagccgcccctcgccgcctatggcgtgaccgacttcggccgcgccaaggacatgatcgacgccggctaccgcgccacccgcgcccttgacgtacgcctggcccacctgcgccctgccgagccggtcgacccgcaattggtggccgcccgcacaccgggcgaacgcaccccggtgatcaccgcgatcagcgtagagaacgattcgaaagtcagcgacgacgtgatccgctactacattcgccagcccctgggcgagccgctcaacctgggccgcctgcaaaccgacatgggcaccctgtacggcctggattatttcgagcaggtgcaataccgcgtggtcaagaaaggccaggacaacaccctggtaatcagcgcgcggggcaagcgcagcggcaccgattacctgcgcctgggcctgaacttgtcggatgacatgcgcggcgacagcgccttcaacctcggcgccagctaccgcatgaatggcatcaaccggctcggtgcggaatggctgacgcgggtgcagatcggtgaccgccaggagctgtacagcgagttctaccagccgatggacaccggctcgcgctactttgtcgcaccgtacatcagggcccaggcgcagaacgtcgagctgaccctggacaacgacccgatctccgaataccgcctggagcgctacggtttcggcttgaacgtcgggcggcagatcggcaacagcggcgagatccgcttcggcgtcggcgaagcctggggcaaggcggatgtgcgcatcggcgaccgggattcgcccagtgtgagtttcagcgaagggttctatgaattgaaatactccttcgactccctggacaacgtgtacttcccccacagcggcgaagacatcggcctggccttgcgcgaattcgaacctgggctgggctcggaccagcgctaccgccaatgggagttcaagctcgacaaagccatgagccacggcccggacaccctggtgctgggtggacgctacgggcgcaccctggatgattcggatgtggtgatttcaagcttcctgctggggggcgcgcggcagctctcaggcttccgccaggatgcgatctcggggcagaacatcagcctgatgcgggcggtgtactaccgcaggctcacgcctcgctcgtacttgccgctggatttcccgctgtacctgggtgcgtcactggagcgcggccgggcatggaacaacgacaatgaattcgacagcggctatatcaatgcggcgagtatcttcctggggttcgatacgccgttggggccgctgaacttcagctatgggttcaacgatgataaccagaaggcggtgtatctgaacctggggcagacgttttagcgttttgctcagaacccgattgcgtagagcggcgctgttgtggcgagcgggcttgccccgcgctggggtgcgcagcggccccaaaaacagacgactgatttctaactgaaaaaacgcggtgactttagtggggctgcttcgcagcccaacgcggggcaagcccgcttaccacaacagccctactcaccacagtaagacagcacagtggtttcttcaggacttttccagattcgccaggatgtgcccatgcacgcgcatgcacacgctcaagtcggcttcgtctacccccacaaacagttcgtggcgcagggcggtggcgatggtttcgatttgttcgatcaagggccgggcggtatcacacagcacgatgcgcttggcacgacggtcttccaccacggcctggcgttgcaccaggccttggccttcgaggctgtccagcaggcgagccagtgtcggcccttcgacaccaacgctttgcgccagctcacgctgggtgggtgcctcttcaaaacgagccaagtgcagcagaaccagccagcgcgcttgggataaaccaagccccgccaaacggcggtccagctcggcgcgccacccacgggacatttgcgccagctgcatgccaaaacgatgttgatcggttaacgacataaaaaactcaatgtttagactgaaaataaagtgtggctaattattagtcagctaagcatgagctttgcccgtaggcaagagttgctatgtactgattcgttacattgtcgtaattggcacactaaatttcgaattcggactgcaaagccgcgcgcacgcagtacaaaaccccctctggaacacgcccggtgaacagcggcgctatctccgcaacaggtggcaattcgccctctccgtcgaggaacgcatcctggatttcgccgagcagatcctccggtaaatcaagggcttgctccaacgacaattgctgcttgccgatggattcggcaagcaaggtgtagacgtttttttctgaacattgcagctgaccggcgatctgcatcggggtcatgccggcgcgtgccaggctgatcagttcgtggcggatatcagcgacctccttcggcgcttcggcctggccgccgagcacttcgaggaacgcctggccgtaacgctccaacttgcgcgcacccacgccgctgacccgcgccatctcggccatggtggtgggttgttcgcgcaacatttccaacagcgtcgagtcggggaaaatgacgtacggcggcacgctgtgttcctgtgccagtttgcgccgcagggtgcgcaaagcttcccactgctcgcgctcctcgccacgcaccagttggctggcctgactggtgctggtcttggcggtggtctgcggcttgaggtcgcggcgcaactccaggctgacctcacccttgagcaacggccggcaactgtcattcaagcgaaggccgccgaagccttcgatatcgatgtccactaggccgcgcgcaaccatctgtcggaacaacgagcgccactcgccttctgcgcgggccttgccgacgccatacaccgaaagtttctcgtggccaaagctgcgcactttctcgttgtccttgcccagcaagacatccaccaagtggcccacgccataacgctgaccggtgcggtagatggcggacaagccctggcgcgccggctcggtggcatcccaggtctgcacgccatcgacgcagttatcgcaatgaccgcaaggttcgggcatgtcttcatcgaaatatgccagcagggtctggcgccggcagcgggtttcctcgcacagcgagagcatcgcgtcgagcttgtgctgttccaggcgcttgtgacgctcgtcgccctcggagttctgcagcatctgcttgagcatcaccacgtcctgcaggccatagaccatccaggcatccgccggcaggccatcacggccggcgcgaccggtttcctggtagtacgcctcgagggatttgggcaggtccatgtgcgccacgaagcgcacgttggatttgtcgatgcccatgccgaacgcgatggtggccaccatgatcaggccttcctcgttgaggaaacgcttctggtgcgccgaacgcgtttcgttgggcaggccggcgtggtacggcaacgccgggtagccttgctcgcagaggaatgcggcgacttcatcgactttcttgcgcgacaggcaataaacgatgcccgcatcgctgcgccgttcggagagaaacgccagcaactgcttgcgcggctgttccttgggcacgatgcgatagaagatattcggtcggtcgaagcttgagaggaagcgctcagcgttctgcagatgcaggcgctcgacgatttcttcgcgggtgcgcttgtcggcagtcgcggtcaacgcaatgcgcggcacatcgggaaacagctccgccaactggccgagttgcaggtactcgcggcggaagtcatggccccattgcgatacgcagtgggcttcgtcgatggcgaacagggcgatttccaggctctgcaaaaacgccagcatgcgcggctgtaccaggcgctcgggcgccagatagagcatcttcacttcaccgcgcttgatgcgagcggccaggtcacgctgctgttcggcactgagggtagaattcaacgatgcggcggcgacacccagctcttccagggttgccacctggtcgtccatcaatgcaatcaaaggcgataccaccaccgccaagccattgcgcaacagtgccggcacctggaaacacaaggacttgccgccaccggtaggcatcaggaccagtgcgtcaccgccactggccacgcgctcaatgatcgcaccctggcggccacgaaaactgtcgtagccgaagatgtccttgaggacgcgttgagcctgctcgagcatgtaaaactccaaaatggtgccgaaatccctctgtacaggctggccgaaaaaacacgctttcacgggaaataatccgtaagcgaagttttcgcgggctggcgcttggcctgcaagggcatcacaaaacgcggcagtatacccgagcgatccccggcaaagggcatcactgacgaatagcggccgcgatctaaaatgccgtgcggctggcctgggcgctcaagaaagcctagaattcagcatcgtttattcccaaggtaactcttcaatgtccttcgctgagcaactaacccgcctgcaagccttcctcgacgccgatgagctgcatgacgaggcgctggactacgtggccgcccacggctacctgaccgccttgtcgatctgctccgaggtcgtgcctgaccgtgaatggatcgatgcgctgttcgccgaagagccgcactacaccgacgccgcccaacgcgaagaaatcgaagccaccctgctggccctcaaggcccacatcggtcgccaactggcctccgacgaagagttcgagctgccgtgcgaactggaccttggcgaagagccggatgattccgacctgcgcggctggtgcattggcttcatggaaggcgtgttcctgcgtgaagccgcctggttcgaaaccgccgaggaagaagtcagcgaaatgctgctgccgatcatggtcggttcgggtctgttcgacgaccagccggagttctccgacatcgccgccgacgccaacctgatggacgacatgatcgtgcagatcccggaagccctcaccgcgctgtacctgctgtgcaacgcccctgacgaaaagccggcgatcctcaagccacgtcaccactgagtcgcttgcccgtgacacccatgggcaaccgtccgctgctcctgcgctacctgctgctggccattggttggttgagcgtagcgctgggggtgatcggcattttcctaccggtattgccgaccacgcccttcctgctgctcgccgccgcctgcttcgcccgaagctccccacgtttctaccactggttggtgcagcacccgcgccttggcccgtggatccgtgattacctggacggcaacggcatcccgctcaaaggcaaggtctacgccatcggcttgatgtggctgagcatcggcgtgtcctgctatttagtgccattaccgtgggcgcgcggcttcatgctgaccagcgccgtgctggtgacaatctacatcctgcgccagaaaaccctgccaccgcgctgaatgacctgcgacattcgatcccacacgaccttggtcgacactgactaaccccaagcatcatgcgagactgtccaaccgggcctggaatgcccgggtgttcctatgctcggagttaccatgtcgctgtccagcgggctgatcgccgccgttgccctggcctatatggccattatgtttgccatcgccttctacggagaccgccgccgtgcgccactgccgccgcgcatgcgtgcctgggtgtacagcctgtcgctggcggtttactgcaccagttggaccttctttggcgccgtaggccaggccgccgaacagctgtgggcgtttttaccgatctacctgggaccggtgctgctgctggtcctggcaccctgggtgctgcagaagatgattctgatcagcaagcaggaaaacatcacctccatcgccgacttcattgccgcgcgctatggcaaatcccaatcgctggcggtggtggtcgcactcatctgcctagtcggcgtattgccctatatcgccctgcagctcaaaggcatcgtgctcggggtgaacctgttgatcggcgctggggccgacaccaccggcacccgcgcccaggacaccgcgctgatcgtgtcgctggtgctggcactgttcaccatcgtatttggtacgcgcaacctcgacgcgacggagcaccaccgtggcatggtgctggcgattgcgtttgaatcgctggtcaagctgttcgcgtttctggcggtgggcgcgtttgtgacctacggcctgtacgacggtttcggcgatttgttcagccaagccatgctggcaccacgcctggaggagttctggaaggagaccgtcaactggccgtcgatggtggtgcagaccggcgtggcgatgatggcgatcatctgcctgcctcggcagtttcatgtcacggtggtggaaaacatcgaccctcaggacctgcgcctggccaaatgggtgttccccgcctacctgattctggccgcactgtttgtagtaccgatcgccttgggcggcaagatgatgctgccgggctcggtgctgccagactcctacgtaatcagcctgcccatggccgaagcccatccggcgctggcggtactggcctttatcggcggtgcctcggcggccaccggcatggtgatcgtggcaagcatcgccttgtcgaccatggtctccaacgacatgctgctaccgtggttgctgcgccgctccagcgccgagcgcccgttcgaagtgttccgccactggatgctgtcggtacgccgggtcagcatcgtgatcatcctgttgctggcctacgtcagttaccgcctgctgggctcgtccgccagcctggcaaccatcggtcagatcgcctttgccgccgtgacccagctggcaccggcgatgctcggcgcgctgtattggaagcaggccaaccgacgcggcgtatttgccgggctggcagcgggcactttcctgtggttctacaccttggtcctaccggtaacggcgaaaagcctgggctggtccctcagccttttcccaggactgacgtggatgcattcccacccactgggtctgtccgtcacttcgttgaccttgggtaccgtgttttctctggcaggtaacttcacgctgttcgtatgggtatcgatgctgtcgcgtacgcgggtttccgaacactggcaagccgggcgttttattggccaggaaatcagccaacgcgccagcgcccgctcgatgctatcggtgcagatcagtgatttgctcagcctggccgcgcgctttgtgggtgaagaacgcgcccagcagagttttatccgcttcgcctatcgccagggcaaaggcttcaaccccaaccagaatgccgacaacgactggatcgcgcacaccgagcgcttgctggctggcgtactcggggcgtcctcgacccgcgcagtggtgaaagccgccattgaagggcgcgaaatgcagctggaggacgtcgtacgcatcgccgacgaagcatcggaagtgctgcagttcaaccgcgcattgctgcaaggcgctatcgagaacatcacccagggcatcagcgtggtcgaccagtccctcaagctggtggcctggaaccggcgttacctggagctgttcaactacccggacggactgatcagcgtcggccggccgattgccgacatcatccgctacaacgccgaacgtgggttgtgcgggccaggtgaggccgaagtgcacgtggcgcgacgcctgcactggatgcgccagggtcgcgcgcacacctctgaacgcttgtttcccaatggtcgtgtgatcgagctgatcggcaacccgatgcccggcggcggcttcgtgatgagtttcaccgacatcaccgcgttccgtgaagccgagcaggccctcaccgaggccaacgaaggcctggaacaacgggtgaccgagcgcacccacgaactgtcgcagctgaacgtggcgctcaccgacgccaagggcgtggccgagtccgccagccagtcgaagacgcggttcctggcggcggtcagccatgacctgatgcaaccgctgaatgccgcacgcctgttctccgccgccctctcccaccagaacgacggcctgtccgacgaggcccggcaattggtgcagcacctggacagctcactgcgttccgccgaagacctgatcagcgacctgctggatatctcgcgcctggaaaacggcaagatcaacccacagcgccagccttttgtgcttaacgaactgttcgacaccctgggcgccgagttcaaggcgctggcccaggagcaaggtctgcgcttccgcctgcgcggcagtcgtttgcgcgtggacagcgacatcaagttgctccgcaggattctgcagaactttcttaccaacgccttccgctatgccgacggcccggtgctgctcggcgtacgccgacgcaaaggcgagctgtgcctggaagtatgggaccgtggcccggggatcccgctggataaacaaaaggtgatcttcgaagagttcaagcgcctggacagccaccagacccgcgccgagaaaggcctggggctgggcctggcgatcgccgacggcctttgccgcgtgctgggccaccgcctgagtgtgcgttcatggcccggcaagggcagcgtcttcagcgtgcgcgtgccgctggcccgcaaccaggccagcccgcaggtcaagacgccgcaggaaaccggcttgccgctgagcggtgcgcaggtgctgtgcgtggataacgaagagagcatcctgatcggcatgcgcagcttgttgacgcgctggggctgcgaagtctggaccgccaccgaccaggcgcaatgcgcggcattgctggctgatggcgtgcgccctcaattggcgctggtggactaccacctggaccatggcgaaaccggtactgaactgatgggttggctgcgcgcgcaattggcggagccgattcccggtgtggtgatcagtgctgacggtcgcccggagatggtggccgaggtgcatgcggcggggttggattacctggccaagccggtgaagccggcggccttgagggcgttgctgagccggcacctgccgttgtaggagacggcaagccggcgcctacaattactcgggcagatgggccacgccatcggagtcggtcatcgcccgctccagcagatcagcgggaaggctcttactggctcgagcaccgagcaacctcaattgctcagtccggctgaccagatttccgcgtccatctgtcagcttgttacgcgctgcgctgtaagccttatccaactgctgtaaacggttacccacttcatccaggtcctggataaacaacacgaacttgtcgtagagccaaccggcgcgctcggcaatttcccgggcgttctggctctggcgctcctgcttccacaggctgtcgatcacacgcagggtggccagcaacgtggtcgggctgacgatcacgatatggcggtcgaaggcttcctggaacaggttcggctcggcctgcaacgcagcggaaaacgctgcttcaataggcacgaacagcaacacgaaatccaggctgtgcaggccttccagacgtttgtaatccttgctcgccagacctttgacgtgattgcgcagcgacagtacgtgctgtttcagggccgcctggccgatgacctcatcatccgccgccacgtattgttggtacgcggtgaggctgaccttggagtccaccaccacctgcttgtcaccgggcaacatgatcagcacgtccggctggaagcgctcgccatccgggcccttgaggctaacctgggtctggtactcacggcctttttccaggcccgcatgctccagcacccgctcaagaatcagctcgccccagttgccttgggttttctggcccttcaaagcacgggtcaggttggtggcttcgtccgacagacgcaggttcagttgctgcaggcgctccagctctttagccagggaaaaacgttcgcgggcctcgttctggtagctttcttccacgcgtttttcgaaggactggatgcgctctttcaacggatcaagcaattggcccaggcgctcctggctggtttcggcgaagcgctgttcgcgctcatcgaagatcttgccggccagctcggcgaactgcgcgcgcagctcatcccgtgagccttgcaggtcagtgaggcgctgttgatggctgtcctgttgttcgcgcagttcggcgcgcaaggccgctgacagagcgtcgaggcggcgcagctcggtctccttggcgctgcggtcgaggttccaggcgtgggcggcgtcgcgggcattgtcgcggtcgatctgcagcagttcgacttcgcggcgtacggccgccaggtcggcctgtttggcagcattcgcctggctcagatcgctgatctcgtcgcggctggcatccaactgtgcggcgaggccctcctgggccagttgcgcagtggccaggcgctcttcgagcagctcccagccggtcatgcgcgcggtcagtcgccgctgaagctgccagcacagcgccaataaaggcacggcagcgcctgcgaggcccagggcaatactggtccagtcaaaaaccatagacatgtctgccatcaccgaaaaaaagcaaggttagcggagcccagggcctgaggacagctcagtcttcgacctggcccagttcacgctgggcgcgacggtcaccggcgcgagccgccaggcgcaacaggtcgtggccgatgcggcggtcacgggcattcccgcactcacggcacatcagttggcccaggcggctttgggcagcgaccacgccttcacgggcgggctgcttgagcaagcgcccggcaaagtgtttgatgttggtgttatgacccaggcgcggactgtcgagcagccacaaggcaactttcaaggagaagcgcttgggggcggtaacagtttgaggggtatcggtaacagaaggtgatactgagcgaaacttcataaagcactgtgggacagatcggaaggcgcgccactctactctttttttcgtacaggtaaagctgaaaaaactctgcacgcccgttctagagcaagcgctcgggacaatccacagaagctgtggataactcagtggacaacccccctttaactcgcgcaaagccccatggaatgggggtcgcagtcaaactgacgattttttcaccaataaaaaaaagccagatttttcattgacttaaatttccattgcaggcaaatggcggcccggtagagcagttgacagcgcggttacacctcccacaactaatgtgcacaagtacccatccgacggttatatcgctggcgttttttgaagcaacttgctgcaaagatgttaccgccggggcaaaacagggacttttcaaatctttcctggctcgccacactccccgacctacagcgcaacggtggaggggtcgatgaaaggaattctgttgttcgcggtgctgctcctggccatctgcgccatttcattggggatcaatgcggcactgccctctccggatggggcactgttcgccatcgccatcctgctgtcggcggcgttcacggctgtgagcttgtgcattgagctcggcgaaggccggatcaacgatatgggtgatgtgatgaaagtggtcgagaccggccagtccctgcgcttgaccctcgccgcctatggcctgggttgctcgctggcagcagcagccactgtgctggtctatcgaggcctgctgggcagctgattgaagttttttggctaacccacttcccttacctgtttcaatccgttactatccgcggcgttagtaccaagctgaaagtcaattctggtcgaacaattcccctgcacaacacgggatcgaccacctcgatggtttccaggtatcacttgcgacgacactgcctttgaacaagcaaagggtgccgcgaagtttccatactctgaccgaaccaacctgcaaattgatcaggatcttcaccctgggcccagaacctttgcccctgttgtgttgcctgccctcctaagtacctacctgccagcccaagcgcgcctaacttaatagcgcttcaaactggctgctttgttccagtcgggttcttcgtttgatcaatggtgatcaacgttactggaacgttttaatacggcacggatcttatttcgtgtcatttgtaggaacacccataatatgaacgctcaaatccacactcaggatgccattcgcaccctaaccaacgcttttgctccaatgaactgcctgatcatggctgcgcgcaaaggctgcttcagcttcaccctggtcaacgaacacggcattgctcgtcacagcgaacgcctgtaccccgatcaatactccagcgcagaaccgctgcaggccgtgatcgagcgtacccgtcaggcattgaccgcctgaccgacccgagtcgctgaaacacaaaaaccctgcttgaacagcagggttttttattgcccggaatttaccggctcagctattgcactaagttcaaatagatataaacattataactaaatgaagaagatgttttaaaaacagtcctttacatcgtaaatatgacactacacttcaactcaagcggcatgatccgcttccggcgagcctgagatccgatccactgctgccaagcccccaccttctcaggcttcgtcgaccactttcacggattgaggcgtgtatgggtatcgctgccagcgaattgtgtcgttatgtgatcaggccgacgttgatgtacctcggccgacataacccgacggccgagtccctgctgctgggcatcgccgccagccagtcggaactgggttccgccttgcacgaccggcgtggccacggcctgtacagcatcaccgaaccgcgccaccgtgccttgtgggacagctacctggcgctggaccccgagcgcgccagcctggtacgcggcctcgctagccaacacgcgttcctcagcgcaccgcaacttgagctcacggtcaacctgcgttacgccaccgccatcgcctggctcctggtggaacagcacacccctgcactgcccccgcccggtgatgtgctggccatggcacgtatctggaaagaaatttttcatccacaaggaaggctgcgcgatttcactcaagcctggcaaacctgtgtttcacccatgaatcaggtggtttgctgaccgggcaatttgcaagattcgccaaaaaaccaggattttggtcggattgtcctacaaaaccgctctatctcctgcattacagcctatagcgcgatgttaaatttattgttactttccgcagcggtgatcaccacggagttctaataatgaaaaaagtaatgctcaagaccacacttagcctcgccgttgccatggcctcttcccacgtgttcgcaagtggctttgcccttaacgaacaagacgtcgcaggaatgggaacgggtttcgcaggccgctcttcttctgccgaaaatgcaagtaccgtttatggtaaccctgccggtatggctcgccttgaaggccagcaagtcactggcggtgttgcagcgattgatgcctcaagcaacatcaaggatgtcagcggccgctccacaggcacgaacaaaggcgatatggtgcctttcactgccgttccttttgggttctacaccaataaactcaacgaacaatgggctgtcggtttcggcgtctatgctccgtttggcctggtgacagactacgaaagtggcttccaaggcaaagcttttggcagcaaaagcgaagtgacggtcatcaccttccagcctacggtgagctacgccttcaacgatcgggtttccattggttttggcccgactatcaaccgtatcgctggtacgctcgagtccgatatcaacctaccagtccctggtaccggcgccaacaacatcaagatcaagggagatgacaccgccgtcggcttcaatgccggcctgctggttcaagccactgatacaactcgcgtgggcctgacctaccactcgaaagtgaaatacaagctcgaaggccatactgaagtgaccaaaggcaccaacgttccggctgcgctgctgaacaatggccgctacgacgcgtcgctgaagatcgacacgcctgaatcctgggacctctcggttactcaagacatgagcgacgcgtggaaactctacgcaggcgctacatggacccgttggagccgactgaaagacattaccgtcaacaacgaaggtgtatcggccgcagccggtagcggtgctttggctccgcaaattgtcggcaccatcaaagaagaccagaactggcacgacacttgggcctatgccttgggtacctcgtatcgcgtcaccaagcaagtggtgctgcgtaccggcctgaccttcgaccagtcgcctaccaacaacaaagaccgttcgccacgtatcccaaccggcgaccggactatcttcagtctcggccttggttacgatgtaatgccgaacatgaccgttgatctggcttactcctacctcaaggaagaaccagtcaaggtcgctcgcgccaacgcattgggccagtcctacaatgctaagtacgagaacagcgccaatggttttggcctgggcgtaacgtacaagttctgatctgacaccgtatgaaaaagccccgctctcctgcaaaggaagcggggctttttaatggctggccctcaaggtttggaggcgatcgcctgctccaccgccttgatcagatccggactgtccggcttggtcaaactggagaaattggcaatcaccttgccctgccgatccaccacgtacttgtagaaattccacttcggcggtgtgtcggtctgctgtgccagtaccttgaacaggtgcaccgcgtccggccccttgaccttctgcggttcggtcatggtgaaggtcacgccgtaattcacgtagcagaccttggcagtctcttcgccggtcttggcttcctgcttgaagtcatcggacggcacgccgatcacttccaacccttggcccttgtaacgttgatacaaggcttcaaggcctttgaactgtggggcgaacccgcagaagctggcggtgttgacgatgaccaggggcttgccggcaaagcgctggcacaggtcgatggattccttggcgcgcagcttgggcaactggccttccagcagcggcgggcaactggcggccagggcggcactgccaatggccatcaggacgggtacagcgagccaacgcatctgcatgtcgtgtgtccttgaaagtaatcaaaccaccaacttaacagatcgacatacccagttgcatcaacgccagcccgccatgctgccagccccaccaggccagcagcaccaggatcagccccgcaacgaggatcacaccgcgtaacgctacattcatgccgcctccatctgcgcctgcaagcgcgccaccggccgctcacgtaccggccagttaagggcggcggcgagcaggctcaacagaatcgccacctgccagatcaaatcgtagttaccggttcgatcatagaccaccccgcccagccagccacccaggaacgaacccaactggtggaacaggaacacgatgccaccgagcatggagaggtttcgcacaccaaacagtgtcgctacggtaccgttggtcagcggcaccgtggatagccacaggaagcccatcgccatgccaaacaggtaggccgtgatctcggtgaccggtgcccacagaaacagcacgatcaccaccgcacgcagcaggtacaagcccgtcagcaggcgcggtttggacatgcgcccgccgagccagccggcggtgtaggtcccgaagatattgaacagcccaatcagtgccagcaccgtggtgccgacggtggccggcaagtgttggtccaccaggtaggccggcaggtgcacgccgataaacaccacttggaaaccgcagacaaaaaagccgaacgccagcagccagaagccggaatgggagcaggcttccttcaaggcttcccgcagggtttgctgacccgccaccgccggtaatggccgatccttgagcatggcgaccagcggcagaatcaacgccaccatcaggccgagcgccagcagggccgcggaccagcccagccagctgatcaaacccagcgtgcccggcaccatcgcaaactggccgaacgaaccggcagcactcgcgatgcccatcgccatgctgcgtttttccggcgccaccgcgcgacccaccacaccgagaatgaccgagaacgaagtgccggacaggccgataccaatcagcaagcccgcactgagggacaacgaccacgccgaatcggacatgcccatcaacactaggccaacggcgtaaagaacaccgccgacaaacaccgctttggtggcaccaaaacggtcggccagcgcaccggtgaacggctgcgccaggccccagatcaggttctgcagggcaatggcaaaagcaaaggtctcacggccccagccaaattcactgctcatcggcgccaggaacaggccgaaaccgtgacgcacgcccaacgacaacgccaggatcagcgcactccccacaagaatccagccactggtgcgccacatcgaggtcatttcttattctccgctcgcgggtatatacccgcttatattcgaaccaacccgcgctcaggcgagttcgtccagcaaggccaacaaggtttcgcgtttttccgcgcccagttgatcgatcaatttctgttgcgctgcctcccaagcgggtaatgcggcggcaagtcgcgcctcaccctctttggtcaacatcaccaggcgattgcgcaggtcgtcgccttccaccagttgcaccaggccctcgccttccagcacccgcaggttgcgccccagggtgctgcgatccaggcccatggcttccgccaggctggaaatgctcggctggtcgagccgttgcaggttgcacaacaaagaatactgggcgacgttgatcccgaagccgtcgagagcgccgtcgtaatgcctgctgacgccacgggcggcacgtcgcaggttggtacacaaacattgggaggcaagcatggaacgtgtatatacccgcgattaaggaaatgcaagaaagtgttacagcgccaggccgaccaacaccacgacttccagcagttccagcaaggcccctgcggtgtcgccggtggtgccaccgaggcgattgaccatcagttggcgcacacccacaaaggcgatcgccgcgagcaataccgcaaccccgccgctgaagccaccgatcaggatgcaggcaagaccactgaggatcagtacctgttggccgacgatcctcggtaaatgatccgacaatgcctggcccaatccaccggcacgcacgtagcgcgtggtcagaaacaacgccagcatcgatgcccggccgatcagcggggccaggatcagcgcggcgccgttgtgttgttcgatcaacgccaccaacgcggtgaacttgagcagcagcaccaagccaagcgtcaccaccgcaatcggcccgctgcgcgggtccttcatgatggtgagcgtgcgctcgcgatcaccgaagccgcccagccaggcatcggcgctgtccgccaggccgtccaggtgcaggccgccactgagcaatacccaggccgtcagcaacagtgcggcgtgcagcagcaatggcgcgcccatcaataggctgttcagcgcccacaacagcacgccgaacaacaggcccacgaccggataaaacagcagcgaacgccccagctcctgaggctgcggcatgccgggcaggcgaatcggcaggctgctgagaaattgcagggcgatccagaagggcagcatgtctacgccccttccttcagcgtgccgtcagctgcaacttggaggctgaacagcccaccatgaccaacttcgacattcaataactgctcccggggcaaaccacgcgcctgcgccagtaacaggcgcatcacgccgccgtgactgatcaacaacacccgctcaccggcatacgcctgatacaggcgtgagacagcccccataacccgctcggaaaaggcgctgaccggctccccgtccggcggggtaaagctataaggatcggcccagaacaaccccagcccttcggcgtcggtctccatcaaggccgctgcactctgcccttcccaggcaccgaagtgcagttcttgcaggtccttctccagcgtcaccggcagctcgagccgggcgcctaattcttcggcaaatcgcgcgcagcgtcgcaacggcgaactgatcaagcggtcccacggcccctgccccaccacggcctcgcgcatctgcgcccagccgttggcggtgagtgcgtcgtccaggctgccacgcaggccgccgcccagctcggtttcgccatggcgcaacaggtcgaggtgcaaggtcatgccgggcggtctgccacggcggcttcggcaaaggtcgccatctgcccgtgcaatgcacaggccaggcgcaacaacggaaccgccaacgcagcaccactgccttcgcccaggcgcaggcccagttccagcagcggctgcgcgtcgaggtgttgcagcacatgacgatggccaggctcggcgccgcgatgaccgaacaccagccactcacggcacgcagggttcaggcgcgtggcgaccagcgcagcgacggtgcagatgaacccatccaccagcaccacaatgccctcctgagcacaggcgaggtatgcccccaccagcgcagcaatctcgaagccgccgagattgaacagggtctgcaaggcatcaccgcgctgagcggcatgcaccgccagcgcgcgttcgatcacggccactttgtggcttacgccctgggcattcaagccggtgcccggccccgtcaggtcactgacctggcagtcgagcaaggcacacgccagcgcactggcggcggtggtgttgccgatgcccatctcgccgccgataaacagctgtgcaccacctgccaacgcacgccgcgcactgtcacgaccgacttgcagggcgagttgcccctgtgcctgggtcatggccgggccgttgacgaagttggcggtgcccgcgccgatattcaggtgccgcacaccgggaaggtccagggacggggtcaccgtgccgaggtcgaccacttccaactgggcgtccaactgccgcgccaatacgctgatggccgcgccaccgctgacgaagttgtgcagcatctgcccggtgacttcctggggaaacgccgacacgccttcggcaactacgccatggtcaccggcgaagatggcgatccacagcgagtccaccgacggtttgacctggccctgcaagccggccatttgcaccgccagcgcttccaactggccgagggagccggccggtttggtcagttgctgctggcgtgccagggcatgttcgtacgcttgagtgtcaatcgccttgcacgggttgagccaccaggtgtcagtcataacgcagtacctttcaaagtcaggggcaggccggcgacggtcaggacaacacgctgacaccgctcggccaaggcttgatgcagccaaccggcttcatccacatagcggcgagtcaattcgcccagcggcacgacacccagaccggtctcgttgctgacaaaaatgatttcacccggcagcgcggccagggtttccagcagttgatcgcgctcggcggccagacgatccgagtcctcaagcatcagcagattggtgagccacaaggtcaggcaatccaccagcagacagcgctcggttgctgcgttttcacgcagtacacgcgccagttcgacgggttcttcgatcagcccccaatggttggggcgacgctggcgatgcagggcgacgcgctcgttcatctcgccatccaaaggttggctggtggcgatgtacgtgacgggcaaaccgctgtcagttgctagcttttcggcgaggcggcttttgccggaacgggcgccaccgaggatcagttggagcatgacataacacctcgtttggccagtgggaccctcgaagctggcacggttccctgtgggagggagcttgctcccgatggcgtggcgccagtcagcccattggctactgacacaccgccatcgggggcaagccccctcccacctttgggttgcagtgcagcagttgaatactcagcgcattcgctcactgtcaaatcccacatagtttgcgtaacaactcagtatccaagtggttctccaccaagtccgccaggcgctcgatatcgcgctcgcgcagggcgtggtaatccacttcctgcacgtcctgcaaaccggcccagcgcaacagggcgctgcacgcggccgggctttcaaacaagccatgcaagtaggtgccaagaatttgcccatcggcactttgtgcgccatcgctgcggccatcatccagcagcacggcggcattcgacaaagcatcgccgcaggtcacgcccgcatggatctcataaccgctgacctcggcattctccaacaacaaacgcccgcgcacattgcgcaattgcttctcttcttccagcgtggtgctgaacgccagcagccccaggccatcactggaaccggcaagcccttccaggcccaacgggtcgtgcacttgctcgccgagcatctgcaagccgccacaaatgccgagcaccttgccgccatagcgcaagtgacgcgccacggcggtgtcccaaccgttggcacgcagataggccaggtcgctgcgcacacttttcgagccgggcaggatgatcaggtcggcggccgggatcgactggcccggaccaatgaattgcaaatccacctgggggtgcaggcgcagcgggtcgaaatccgtgtggttgctgatgcgcggcaacaccggcaccaccaccttgagcacctgggccgccttgtcgatctggcgttggtcgataccgtcctccgcttcgaggtgcaggtccatcacgtagggcaacacgcccaccaccggtttgccggtgcgcgcttccagccagtccaggcccggctgcaacagcgcgatgtcaccgcgaaaacggttgatgataaagcccttgacccgcgcctgttccgtgggtgacagcagctccagggtgccaaccagatgggcgaataccccaccgcgattgatatcggcgatcagcaacaccgggcaatccaccgcctcggcgaagcccatattggcgatgtcattggcacgcaggttgatttccgccggggagccagcgccttccaccatgaccacgggatagccctggctcaaccgcgcatgggaggccagcaccgcctgcatcgcgatggctttgtagtcgtgataggccacggcgttcatggtggtcacggcacggccgtggatgatcacttgggagccggtgtcgctgttgggcttgagcagcaccgggttcatgtcggtatggggtgccaggttggcggcctgggcctgtactgcctgggcgcggccgatctcgccaccttcggcggtcacggcgctgttgagcgccatgttctgcggtttgaacggcaccacggccacgccctggcgtaccagccagcggcacaatgcggtcaccagcgtgctcttgccggcatcggaggtggtgccctgcaccatcagcgtactcatgttgcgtccttataggcggccagggcttcgtcgaggcgctgccagtcggcctcggtgtcgggcaggccgaaacgcaggctgctgtcgtggacgaacaggcgcagcagaatgccgcgctgggccatgaattcgtgcaaacgctcagcgtggggcgtgatcagccattggaacagcgcgcagccaccgtggggtggaaaaccgtggcgctccagcaacgcgaacaaacgctggcccgcctcgacacaacgcgtgcgttgcagcgcatgcccggccgtgtcgcgcaggcacacttggcccagcacccgcgtcggtccgctgaccgcccaggggccgacctgctcggcgagcaacttgagcaacttgcgctcggccaacgcaaaacccaatcgcacgccggccaggccgaagaatttgccgaacgagcgcagcacgatcaaaccgacctgatgcgcctggctggccaggctcagttgcggggtcacgtccatgaaggcttcgtccaccaccaaccagccgccgcgctgggccagccgcgagtgccaatccagcaagcgttgcgggctcaggctcaggccggtcggattattggggttgaccaccactagtacgtcgaggccatccaggaagaagtcgacttcctgctcctgcacttcgcgcaccacgtaaccggcacggcgccaggcttcggcgtgttcggcatagcacggcgacagcacgccgaccttgcccgcgcgacgcagccgcggcagcaactggatcgccgcctgggaacccggcaccggcaacagatgcgcagcgccatagtattcgctggcggcctgctccaggccgtcgtcggtttccggcaggcgcgcccaggcgcgcaacgggatctcggggatcggccaaggccagggcgcgaggccgctggacaggtcgagccagtcggcttcggctatcccgtattgaatcgcggccttgcgcaaccggccaccgtgctcaagcatagaattgcgcccccgcgcataggatcagcagccacaaccatacgccgcgctgcaccagttgccagccccggtcgatggaatcggcatccgccgccgggccttcgcccagttgcggacgatggtgcacttcaccgtgatagatcgcggcaccgcccaactccacgcccagggcgccggcacccgcggccatgaccggaccggcgttggggctgtcccaggccgggccttggatccgccagcatttaagcgccaggcgcgtcttgcccagcagcgcgtaggtcaacgccaccaggcgtgcgggaatgtagttcagcacgtcgtcgatttttgccgccgcccaaccgaagcgctcaaagcgctcgttgcgataaccccacatggcgtcgagggtgttgctcaggcggtaaagcaccacgcccggcacaccggccaccacaaaccagaaaatcgcagcgaacacagcatcgctgccgttctccagcaccgattcggtagcggcacgggcaacttcggtgcggtccagctcgctggtctggcggctgaccaggtagctcacgcggttgcgcgcctcctccaggtcatcactgcgcagcgcctgggccaccggaatcacatgctcgccgaggctgcgcatgccgagggcgcagtacaacgccaggatctccagcacccagccgatgtacggcgcccacgacaaggccgtggccagcagcgtcagcggcaccacggcgataaaccacgcggtcacgccatggctgcgccagccacggccaccggtattgaaacgctgctcgatgcgcccggcgaaattgccgaacgccaccagcggatgccagcgcctgggttcgcccagcagcgcatccagcgcgactgcagcgacacacagcaaggccacactcattgactcactccccacgcattctcatacaacatgtcactcaacggccgtggttcggtccagccttcgagctgcaacatcggtgccgggtagaactcggccactggtcccaggcacagcacggccaggggtttcgcgccgggcggcaaacccagcagatcggccagcgcctgcggttcgaacaacgagacccagcccatgcccaggccttcgacccgcgccgccagccacaaattctggatagcacaggacaatgacgccatgtccatttccggcagggtgcgacgcccgaagatgtgccgctcgcgatcgtccatcaacgccgccaccagcacttcggcgcagtcgtgaatgccttcgaccttgagcttcatgaactcatcggagcgctcgcccagggcttcggcagtgcgtacgcgttcttcttccaccaattgttgaatctgcccacgcagttggcggtcgctgatgcggacaaagcgccagggctgcatcaggccgacgctgggcgcctggtgtgcggcctggagcaggcggtggagcaattgcggggcgaccgtaccgccgctgaagtggcgcatgtcgcggcgttcggcgatggcacggtagacagcctggcggtcggcctcggggaaggcgttgtcagtcatagtgctgaatcgggcgcaaacaatgcggccaccgcctggggattggatgggaaatagaaatgtacgtaggacgccgtcatccgcccctgccggtataccgcctcggcaccgcgcccgccgttggggctcaggccacgggcgatcggctgccattcagtggtggtcagggaatggtgataggtatggccacgcagggtgccttccggcaattcgacgctttgcagggccagggccgccagtttcttttgcatcaccgcgtcgccctggagcaggccaagcagttcggcgcggacgccgtcgacatcggtcagcgagtccagcaggtagagcatgccgccgcattcggcaagcaagggtttgccggccgcgtggtgagcgcgaatggcgtcgagcatcggggtattttccgacagcgcctggtggtgcaattccgggtagccgccgggcaggtagaggctgtcggcgtcgggcaactggctatcgtgaatcggcgagaagaacgccaactcagcgcccatcgcgcgcagcaggtcgagacttgcaccgtaggtaaaagcgaaggcctcatcgcgggccacggcaatgcgcacgccgttgagcaagggttcggcctcgataacttgcggcgcagcaaatgtcaccggtggcggcaaggcgacttcgcaactgctgcccagggcttgggcggcagcgtccaggcgcacatccaggtcattcagttcgctggcctgcaccaggccgaggtggcgactgggcagttcgataccggtctcgcgtgacaacgcgccataccagcgcaggccctcggtgaggctgccttcgagcagttgcgcatgacgcagggtgccgacccggttggccagtacgccagcgaatggcagatccggctgatagcgcgccaggcccaatgccaacgcaccgaaggtctgcgccatggccgtgccgtcgatcacccccagcaccggcacgccgaagtgccgcgccagatcggcgctggacggtgtgccgtcgaacaggcccatcacgccttcgatcaggatcaggtctgcctcccccgccgcttcccagagcaaacggcgactttcctgcttgcccaccatccacatatccaactgatacaccggcgcaccgctggcgcgctcgtgaatcattgggtcgaggaagtccgggccgcatttgaacacgcgcaccttgcgccccaggttgcgatgcaaacgggcaagcgcggcggtgacggtggttttgccctggccggacgccggagcggcgatcaatacggcagggcaatgacggggctgattcaaagttcgacgcccttctgtgccttgataccggcctggaacgcgtgcttgagcatgcccatctcggtgacggtgtcgcccatttcgatcaactcgggcttggcgccacggccggtgaccaccacgtgttgcatcgggggacgggcttgcaggtcgctgaggacctggtccaggtcaaggtagccgtgcttgagcgcgatgttcagctcgtccagcaccaccaggccgatggaggggtcttgcagcaattcgcgggagaccgcccaggcggcttcggcggcggcgatgtcgcgctggcggtcctgggtttcccaggtgaaaccttcgcccatcacatggaaacgcacttgctcggggaagcggcggaagaacagttcttcaccggtgctgttacgccccttgatgaactgcaccacaccacactgcatgccatggcccatggctcgggccaacatgccgaacgcggagctactcttgcctttgccattgccggtcagcaccagcagcaggccgcattcgttgggggagttggcgatgcgctcgtcgatcacggcttttttgcgcagcatgcgcgccaggtggcgttcgtcgcggtcgggggaatcggtcatggcagctctccgttggggctggacaaaaacggcgggcaggaaaaaaagaacaacagacagccaagcatcgcccaccgtgatgctgttggatgttgcaggccggtctccgggctcatgagtggtgtgcgggttgaaggcaggccaacgctgcgccttcccatatcgcaggcgatacagtggcaaaaagcagcgtcttgactcatttaccgttgcgggggcagcgccggaatcgaggcggcactgtgtagaagtgcgctcactcaccggcttccctgtttcactccgtcgacccgtgggtcacagagcacctggaacaagcggcgaagggtagtaggttgggggtggagcgtcaattaaagcaactgcctcacctgtacttgaagctgccacaaaacaactgtgggagggggcttgcccccgatggcggtggatcagcccattgatcgttagctgacacactgctatcgggggcaagctccctcccacattttgattcgagtctggcgctaaggattgcgtgccaggttgcccggcaacacgcgcttggcgctcaggtaggcattctgccaataggccttggacagtgtatccagcttcaccgtaccgccggtttgtggcgcatgcacaaagcgcccttcacccacgtagatcccggcgtggctgacctgggaaccgccaccggtggcgaagaacagcaggtcaccggtctgcaggttctgctcgctgacgtcctgcgcgcgcattacgatcagctcgcgggtggtacgcggcagggaaatcccggcggcatcgcggaagacaaacccgatcaggccactgcaatcaaacccggagtccggcgtattgccaccccaacgataaggcgtgccgaccaggcccagcgcccggaagagtacgtcttcggccgcaggcgagaaattctgggtggaatagttgaacaccggcttgggcttcaccgctacgggagcgggcggcggtgtgcggcttgcgcaggcgctgaggagcgcggcgcagacaatgagaataaggcgggccgaggtcgacatgtgcagaacaatcctggtctggatgcggctttcgctgccgaacgctgaaaaccagaacgcgcaagcaaagctcgcgcgaacggattacaacaatatccagggattctagcgcttacacgtcaaacttcaagtatcactttaagtttacttgctagcggtaaccgtcgtcggggccatggcgagtgcacgcttggcttcgatgaaggttttgctccagtagctgtcacccaggttatcgacccggacaccaccactgcggcggctgctggagtggataaactggttatcgcccaagtagataccggcgtggctgacacgaccacggcctgccgtactgaagaaaagcagatcaccgggcttgaggttgttgcgtgcgaccaacggtgcattcacgttgatcatttcacgggtggagcgcggcaggttcatgccggcttcttcgcgaaacagatagccgatgaaaccgctgcagtcgaaaccggcttcagaggtaccaccgaaacggtaacgggtaccgatcagggacatgccgcgttcgaggatgctgtcggccaggactggaagctggtaaggcttgttgccggcgaagtcggccagttccttttccgttgcaacttcttcctcataaacagaggcagattgagcagcaacgaattttgcctgattttgaacctgtggtttttgctgatctgccacctgctgagggtgggaggcgcaaccaaacaacagggtaacgagtgcgaggggcacgaggggtgcgaagcgatttagcatgggcacgaccgtggctgatatgtaaagaagtcgagactatgccttctatcacatcgatttgcaaattcaatcgtggtctatgtgacttcttgtttggactatgacatctaagcccttaacaccctgtacctgccttttgcgtggccaaaccggctcaaacgcaggttttctggcgcctgtaatttgccgaaagccgcgaaaacagcgggctagctaccagccgagggtttctttgaggaaggggatggtcagcttgcgctgggcctgcaaggaggcctgatcgagctgttcgagcagatcgaacaatgcgctcatgctgcgggtgcctcgagtaaggataaagtgcccgacctcgtcggtgaggtgcaggccgcgacgggatgcgcgcagttgcagggcacgcaatttgtcttcgtcggacagcgggcgcatctggaagatcagcgccagggtcatgcgcgacttgaggtcggccagcttgatcggcaactcgcggggcgaagtcgacgcggcaatcaacaggcgccgaccgctgtcacgcaagcggttgaacaggtgaaacagcgcttcttcccattccgctttgccggcgatcgcttgcagatcgtccaggcacaccagttcgtattgctcaagatggtcgaagatgccgataccgcggtccatcaactcggccaacggcaggtacaccgccggttcgcccatctgctcgaaccgcaggcacgcggcctgcaacaggtgggtacgccctacgccgtgcttgccccacaggtagatcaggctttcggtccacccggcgtcggcttcgcagagccgctcgacatagccgagtgcagcggcattggcgcctgggtagtagttgatgaaggtggcgtcgtcacgcagacgcacacccaagggcagctgaatcggtttcatgctgactgaacggctccaaacgaaccgttagtggcctctgtgtaaagtttgcaaagtttatacccgtgacgccgggcgcacaatgcaacagaccccaagcaaaatcaaaggtttgcgttaacttgttggatttgtgcagattgtttgacggaccgctcccagaaaagacaaacccggcgttggccgggtttgtgaagaaagggttacaagtcgggatcttcaacccccgtatacgcatccgaatccttgtacagatcgtgcacatggcgcaccagcaccatgatcaccgccgccaccggcaatgccagcaggataccggtgaagccgaacagctcaccgcccgccaggatcgcaaagatcaccgccaccggatgcaggccaatccgatccccgaccagcaacggcgtcagcaccatgccttcaagggcctggccgaccatgaatacggccacgatccccagcatcgggtacaggtcgccgccaaactggaacaagcccgcgaccagcgccgcgccgatcccaatcacaaagcccatataaggtacgatcgcggccaggccggcgatcaggccgatcaacaggcccagttccaggccgatagccatcaagccggccgcgtagatgatccccagggccagcatcaccagcaactgcccgcgcacgaaggcgccgagcacctcatggcattcctcagccagtgaaacaatgcgttcctcacggttgcgcggcagcaggctgcggatcttggccatcatgatgtcccagtcgcgcagcaagtagaacgccaccaccgggatcagcacgaggttggtcagccagccgatcagcgccaggctggacgcagtcgcctggctgaggatgaccccgacgatgtcggtggtctggcccatatgttcgctgatggccgccttgaccttgtcgaacttccagaagccatccgccagccccagcttggcctgggcccatggcatcgccgtgtgctgcagccaatcgagcatctgcggcgccagctcatacaagcggaacaactgcttggccagcatcggcaccaacaccagcaccaacgccgtgatgatcaaggtaaacagggcgaacaccgccaccacgccccaggtccgcgacaacccggccttctccagacgatccaccaccggatcgaacaggtaagccagcagcaacgcgaccaggaacggcgtcaggatcgaatgcagcaggaacacaaaaacgcacagcaggacaaacccgccaagccacacccaacgacgcgtatccgccataaaccactccatctatataaagaagaaaactactaccaacgaaaacgcagttgcgcctgaggttctggggcagcagcaggctgcgcaccctccgccacgggttgctggaccggtgcttcacccgcaggaatttcctgcaacctggccaggctcaactgagtacgcaactgatcggcactgccattgacgcggtacacgatgcgattgccatccactaactgcggctgaccgccgaaaggctccagcagatgacccagcgcggcataacgctcaagggtcatgccctgcacttccagcaattgttcggtgctcacgccgggcttgaccgcaaagcgcggcgccagcttctggctgaccgccagcatcaccgcatcggccacggcgccggtgtcgggcccttgcgccgtgccttgctcacttttgtcgcccagccacagacgccatttggcctgccactggctgccttcctgacgcgcatgcaccgccagcaaggcgtcggcgccgtaacgctcggaggcagcgcgcagcggtgtggcgtcggcactttccagattcggtgcggtggcgaccacctgttcatccaggtcacccagcggcaggcgcaacggcaggcctctgtgttgcgcggcacggcgcagcgcctgggcaacggtctggccatcgcccaccaggctgctgccttcggtggagtcgttcagccaccagccaaggatcgacggccgattgctgccccagatcgacaggcccgcttcccgcagcacgcgatcggtgctcaccgggtcgaaatccacttgcaggctttccggcgggccagcgtcgtagccgtactggctgatgatttgttgcgggtccttgcgaacggccgccaggcccgggccatcggcggccttggcgtcgccggtcaagcggatcaccagggtctgcacggcgcgctgggtcgcctggtcgcgctcttgcggcgactgactgctgacgggctcgagtacttgataaaggccattgagggtttcggcatgactcgccaggctgaccaacgacaaacagcctacaaagaagaacttgaacaaacgcatgaaagattcccgaacgacaaatttagcggctggaacagaccgcgtgaactcggcttggcaaggctgtgaccacagcgaccggtaaaacattcacagggtcctggcagtttttgtactgtcataacgatagcggtttaaaggctataccttaatacgcgccatggcaggggccatcagcattttttaaccggctttttttacctatatggccctgcccgtcggcccgaggatggccgctgcccctcaagcctgataaaatcgcgcgccttcgcagaccgtcaccggctgggccttttaccaaaagcgcctgcccgctcggtcgttacccctgaatcccccctaaaggcctggatcatgagcaagcaaccctccctgagctacaaggacgccggtgtagacatcgacgccggtgaagcattggtcgaacgcatcaagagcgtcgccaagcgcactgcgcgccccgaagtcatgggcggcctgggcggttttggcgccctctgcgaaatcccggccggctacaagcagcctgtcctggtatccggcaccgacggcgtgggcaccaagctgcgcctggcactgaacctgaacaaacacgacaccatcggcatcgacctggttgccatgtgcgtcaacgacctggtggtgtgcggcgccgagccgttgttcttcctcgactactacgccaccggcaagctgaacgtggacaccgcggcacaagtggtcaccggtatcggtgccggttgcgaactgtcgggttgctccctggtcggcggtgaaaccgctgaaatgccaggcatgtacgaaggcgaagactacgacctggccggcttctgcgtcggcgtcgtggaaaaagccgagatcatcgacggctccaaagttgctgccggtgacgccctgctggccctgccgtcctccggcccgcactccaacggttactcgctgatccgcaagatcatcgaagtgtccggtgccgagatcgagaacacccagctcgacggcaagccgctgactgatttgctgatggccccgacccgcatctacgtcaagccactgctcaagctgatcaaggacaccggcgcagtcaaggccatggcccacatcactggcggcggcctgctggacaatatcccgcgcgttctgccaaaaggcgcccaggccatcgttgacgtcgccagctggcagcgtcctgcggtattcgactggttgcaagagaaaggcaacgtcgacgaaaccgaaatgcaccgcgtgttgaactgcggcgtcggcatggtcatctgcgtggctcaggagcacgttgaaaccgcgctgaacgtactgcgcgaagccggcgagcagccttgggtcatcggccagatcgccaccgctgccgaaggcgcggctcaggttgagctgaagaacctcaaggctcattaatgtctcagacctgtgatgtcgtggtgctgctctccggcaccggcagtaacttgcaggccctgatcgacagcacgcgcaccggcgacaacccggtgcgcattgctgcggtgatctccaaccgcagcgacgcctacggcctgcaacgcgccagggacgcgggtatcgacacccgctccctggatcacaaggcgttcgagggccgtgaggccttcgaccgcgccttgatcgaactgatcgacgccttcaaccccaagctcgtggtactcgccggcttcatgcgcatcctcagcgctgacttcgtgcggcattacgccgggcgcctgttgaatatccacccttccctgctgcccaagtacaaaggcatgcacacgcaccagcgtgcgctcgaggccggcgaccgcgagcatggctgcagcgtgcactttgtcaccgaggaactcgatggcgggcctctggtcgtacaggcagtggttccggtagagtctgacgactcggcgcagacgcttgcgcaacgggttcacacccaggaacacaggatttacccgctggccgttcgctggtttgccgaggggcggttgattcttggtgaccagggtgcattattggacggtcagttactcgcggccagcggccacttgattcgaacctaggagattttatgcgtcgcgccttgctcttcgcttttgcgctgttcgccttgccagccgtgcaagcagcagaccttcaccccttctccgtcagctacaccgccgactggaaacagttgcccatgagtggttcggccgaacgcagcctggccaagaacggcgacggctcctggaccttgaatttcaaggcttccatgatgatcgccagcctcaccgaaaccagcgtgatcctgtttgacaaggacaccctgcaaccgaagagctacaccttcgaacgcggtggcctgggcaaggcgaagaagatcaatctggacttcgaccagaccgccaagaaagtcaccgggtttgaaaacaaagacccggtcaacgtgcccctgcaaagcggcatgctcgacaagtcgacctaccagttggccctgcagcgcgacgtggctgccggcaagaagagcatgagctacaacgtggtcgaaggcaccgacgtcgacacctacgacttccgcgtgatcggcccggaaaaggtccagaccaaggtcggctccatcgacgcgatcaaggtcgagcgcgtgcgtgacccgacgcagagcaagcgcatcacccagatgtggtttgccaaggaccagggcggcattctggttgccctgcgccaggtagaaaccgacggcaaggaatacaacatcatgctgcaggacggcaccgttgacggtaaggctgtcaaaggtagctgatcggtagctggaacagagagcctcgcgaatgcggggctttttttcgcctgtcgattgggtttcgcctgacacgaacatgaaacttttgtcataaaactcagggccctgcggcgcaatgtcgcggttttcgcgggctgcagcactgttgcatttaccgcaatgaattgttgcgcgaaaagtcggtttacttagcaagctaacaaatcatataacaaaggcctgcgacgacttgccgcagatccaccagagattggagcaagcagatgactgtaaaagtaactgaacgcgacgacgaacatatgtcccacgaagcactgggccatgggattcacatctgggatgtacaccagcaagacctgttggtcggcatgtttcacaacgagagcgacgctcataattataaaaacgagctcgaagcccttgagatgagacgccagtcagaaagctcctgaagataccttgtagtgagcgggcttgccccgcactgggtggcgaagccgccccactaaaaacgccgcattctttctgggagaatgcggcgtttggttttcagggtcggccctttcaaggtctttaggtagaacaggcgatgagtaccctgtggcaagcccgctcgccacaacaagcctgctcactacaattaaggctgcagccttaccacatcaggtcatccgggatctggtaggcggcgtacggatcatcctcatccggcacctggctttccgtcaggatattgagctggacgatacgctccggtgcgcgctcctggattttcagcgccgcttcacgcgggatcacctcataaccgccgccgtggtgcacgatcgccagggagccgttgctcagcttgttgcgcatcagcgtgttgaccgacaggcgcttgaccttcttgtcgtccacgaagttgtaatagtcctcggtggtcagcttgggcaggcgcgaggtctcgatcagttgcttgacctgggccgtgcgggccttggcctcggctttttcctgctgctggcggttcagttcctggtcgcgcttgaccttctcggcctgcgcttcagccgccaggcgggcctgggtgtcgtctgcctcgatctggcctttatgaaccaggcgctgctgtttctgtttctctttgccgacctgcttggcctgcttttggttgaccagacctgctttgagcaactggtcgcgaagggaaaggctcatggtgcttactcacttaggcaactgctcaaccgcagctggacacattcttttcctgacgtttggcttcgccccacagggcgtccatcgtttcgagggtgcaatcttctatggattggtgcgtatcgcgcaatgcctgttcgataaatcggaagcgtcgctcgaacttggcattggcgccacgcagcgcggtttccgggtcgaccttgaggtgacgggccaggttgaccgccgcgaacagcagatcaccgacctcatcggcaatcgccgcagaatcgttgtcggccatggcttcgagcacttcatcgagctcttcgcgcacgttatccaccaccggcagggccgacggccaatcgaagccaacctggctggcgcgcttctgcaatttggcggcgcgggacagggacggcagcgccgtgggcacgtcatccagcagggagagttgctccggcgcgtcggacttttccgcacgctcctcagccttgatctgctcccagcgctctttgacctgttcttcactcagctgtgggatatccagcggcgcatacaggtcgccggtgggaaacacgtggggatgacgacggatcagcttgcgcgtgatgctgtcgatcaccccggcgaattcgaagcgcccttcttctcgcgccaactggctgtaatacaccacctggaacaacaggtcgcccagctcaccctgcaggtgatcgaagtcgccgcgctcgatggcatcggcgacttcgtaggcctcttccaacgtgtgcgggacgatggtggcgtaggtttgcttgatgtcccacgggcacccgtattgcgggtgccgcaggcggttcatcaggtgcagcaggtcttcgagcgaatacatcatggggtacggttacgccgcgtctcgatgatattcggcaactgggaaatccgccccagcaaccgccccagtgcgtccaaccccggaatctcgatggtcagggacatcagcgcggtgttgtcctctttgttcgagcgggtattgaccgccagcacgttgatccgctcattgagcagcacctgcgacacgtcacgcagcaacccggaacggtcgtaggcacggatgacgatgtccaccgggtaagtgagcaccggcaccggcccccaactgacctggatgatccgctccggctcacgcccgcccagttgcagcaccgaggcgcaatcctggcggtgaatgctcacgccgcggccctgggtgatatagccgacgatggcgtcccccggcagcggctggcagcagccggcaatttgggtcatcaggttgcccacgccctggatctggatatcgccacgcttgccgggcttgtagccggtggccttgcgcgggatcagttccagctgttcgctgccgcgttccggctcgaccagttgctgggccaggttgaccagttgggccaggcgcaaatcgccggcaccgagggcggcgaacatgtcttcggcaatcttcatgttggccttttcggccagcttgtcgaagtccacctggggtaggcccaggcgcgccaattcgcgctcgagcaaggttttaccggcagcgacgttctggtcgcgcgcctgcaatttgaaccagtggacgatcttcgcccgcgcccgcgacgtggtgatgtagcccaggttcgggttcagccagtcgcggctcggcgtgccgtgcttgctggtgatgatctcgacctgctcaccggtctgcaggctgtagttgagcggcacgatgcggccgttgatcttggcgccccggcagttgtggccgatctcggtgtgcacgcggtaggcgaagtccagcggcgtggcgcccttgggcaagtcgatggcatggccgtccggggtgaagatatagacccggtccggctcgatatccacgcgcagctgttcggccaggccgccgatgtcgccgagttcttcgtgccattccagtacttggcgcagccaggagattttctcttcgtactggttggaccccgcctttacgtcggtgcccttgtagcgccagtgcgcacatacacccagctcggcctcttcgtgcatggcgtgggtgcggatctgcacttccagcaccttgccctcggggccgatcaccgccgtgtgcaacgagcgatagccgttttccttggggttggcgatgtagtcgtcgaactccttggggatgtgccgccacagggtgtggacgatgcccagcgcggtgtagcagtcgcgcatttccggcaccagcacgcgcaccgcacgcacgtcgtagatctggctgaaggccaggcccttgcgctgcattttgcgccagatggaatagatgtgtttggcgcggccgctgatgtcggcttcgacgccggtggcctgcaattcggagcgcagctggttcatcacgtcggcgataaagcgctcgcggtcgagccgccgctcatgcagcaacgtggcgatctgtttgtattgatcgggttcgaggtagcggaaggacaagtcttccagctcccacttgatatggccgatgcccaggcggtgcgccagcggcgcatagatgtcgaagacctcgcgggcgacgcggttgcgcttctcgtcgtcggcggtcttcaccgcacggatcgcgcaagtacgctcggccagcttgatcagggcgacgcgcacgtcatcgaccatcgccaccagcatcttgcgcaggttctcgacctggccctgggtgcccagcaccatggactggcgcgggctgaggctggcactgatcgcggccatgcgcagcacgccgtcgatcagcttggccaccacggtgccgaaacgctggctgacggtgggcaacgggatatgcccttcacgcacgccgcgatagagcacggcggcgatcagcgaatcctggtccagcttgagatcggcgaggatctcggcgatttccaacccggtgcgaaagctggaagtgccttcggcccacaggttcttggccgcattgtcttgctgctcggactcacgagcgaactcgcaggcggctttcaaggcttcacggtccagtgccgggtcgacactgatggcatggtccagccatgcctcgagattgatactgccgtcggtgttgatcggctggtgtgctctcacctgtaccatcttgcttaccttccctacgacgcaccttcgatgcgccaaaatcatcgccgacgtttactgcgaactccctggcagatcacaggccctggagaacgcaggccagtcggattaaacgggcatcctagcccgcttcaaataacgccatggcctcgacatgcgcggtttgcggaaacatgtcgaggatcccggcacgttttagccggtagccttgcttgaccaactcaaccgtgtcccgcgccagcgtggccgggttgcaggacacatacaccagacgcttggcgcccaaggtcgcaagcttgcgcacaacctctagggcaccgtcacggggtgggtccaagagtaccgcagaaaagccctgtttggcccattctgcgtcaatcaaaggctgggacaaatcggcctgaaaaaactgcgcattatgcaaatcgttgctgacggcattcacggccgcccggtccaccatggtctgcacaccttccaccgccaccacttcacgcacctggcgcgccagtggcagggcgaaattgcccaggccgcaaaacaggtccagcacccgttcgtcgggttgtggcgccagccattcgagggcctgggcgaccatcgccgcgttgacgccggcgttgacctgcacgaagtctcctggccggtaagccagctccagattccactgttccagttgaaagcccaacacagcatcggtgtcgaccggctccggctggccctcgccatgcagccacaattgagcctcatggaaagtgcagaattctctcaacacctgcaggtccgcttcggacaacggcgccatatgccgcagcaacaccgcaacggatgtaccgctgaacaattccacatgccccagggcctggggtttgctcaggcggcgcagcatgttcggcaggcgctgcatgatcggttgcaaggcctgtaccagcaccgggcaatcatcgatggcgacgatgtcctggctggccacggcgcgaaaaccgacgtccaggtgtttcgccttggcatcccaacgcaccgccacgcgggcgcggcgacggtagccgaattccggcccgctcaacggcgcggcccactcttgcggttcgacaccggccacgcgggacagttgctcggcgagcatgcgctgtttcagggcaagctgttcggtgtggggcaggtgctgcacgctgcaaccgccacaacgaccaacgtgcgcgcacggtgccgggcgacgcagttcgctggccttgaagacgcgctcggtgcgtgcctcgacgattttgccgtgggcacccagcactcgcgcctcgacttcttcgccagccagcgcgccgttcacaaaccaggtgcggccctcgaagaacacgatgccacggccatcattggccaggcgctcgatggtcaggcgttgtttcttgcccaccggaatctgcggggcccggctgccgcccgtcggttggaagcgcaggcctctctcgtgcttggccatcagttgggttcgtcgaagatgccggtcgacaggtagcggtcgcctcggtcacagatgatcgcgacgatcaccgcgttttccacttctttggacaggcgcaacatgcccgccaccgcgccaccggaagacacgccgcagaagatgccttcttcacgcgccaggcggcgggtggtgtcttcggcctcgcgctgggccatgtcgatgatgcggtccacacgcgtggcgttgtagatcttcggcagatactcctcgggccaacggcggatccccgggatggccgaaccttccatcggttgcaggccgacgatctggatcgccgggttctgctccttgaggtagcgcgagttgcccatgatggtgccggtggtgcccatggagctgacgaagtgggtgatggtgccctgggtctggcgccagatttccgggccggtgctggtgtagtgcgcctcggggttgtcgccattggcgaactggtccagcaccaggccacggccttcggcggccatgcgctcggcgaggtcgcgcgcgccttccatgccttcttcctgggtgaccagcaccaactgggcgccataggccgtcatcgccgccttgcgctcggcgctgccgttgtcgggcatgatcaggatcatcttgtagcccttgatcgcggcggccatggccagggcgatcccggtgttacccgaggtggcctcgatcagcgtgtcgccgggcttgatctgcccgcgcaactcggcgcgggtgatcatcgacagcgccgggcggtccttcacggaaccggccgggttattcccttcgagcttgagcagcagggtattactggtttcacccgccatgcgttgcaagcggaccaggggcgtgttgccgacgcaatcggcgattgtagggtactgcaaggtcatggcgtattcgcaatccagactgcggggcgcacatcataccgggaaaggctggcgggccatatcacgcaaagtgtggtgcttattgctttagggtataagcacgagaaatcatccgatcacgaacgctgtccattcctggtgggtaaggtcccgaatccgcttgttttcggctgatgcccttgcgtcccgcacgccattgagacgattcacgtactgcccttcactgatcaagccactcgccagttgttgatcagcaacctccaatagcttctggaaacggcggagcctgaattcgagatctgcggcatatttatgttgaataaaatgcacccagaaaggctccttctgtaacaactcaggccagttcgttcccgtctcattattcagtacagccgtgcgcacggtattgaccgaatggacatccggcacagccgcctcaaaacgctgagggagtacttgcggcaaattcaggctcgatgccagggcgatgcgataactcaggacccgtgtgcacgcgaatgccatgccctggggctcaaagtgcctggaaagatactgatctatgtattcaagacgacgtcgtgcacggtagtaatgcaacagatttggcccggcagtttgtacgccggcatcgagtatccgtagcggagctatttgcaactcaagttgatgtaagcacaacaggcaaccatcaatccctccgcgaagggtgcgataacacggtaagtaagcaattcgctccacgccctcatgggacatcgcatcgtcaatcactccccagactcggtgtgaaatgatctccctcatcacacggtggtgggggtcaatgaactgcgggtaatcggcaatgcttgccagcaactcaaagaaataatccgccattggctggttttgcaagtacgcccaatcgagttggcgcgcttgtacttctccaggagggagcagcgccaaccagcggtcgggacgctgatcaaaaggaaccgtcggttcccataatccgaaatcaacatcgggggggccacgacgctcgcccactcggcgtaacaactgtcgcgcctgcgcggaaagcggattacctctcaagttcattccctgatggacttcgggataaatgaacaagtccgtctcggccaggtcctgtatttgattgtcacgcaggtcaaagctgcccaacgtggagagactcaccgcaccgcgcggtaattggctcaacgcgcaattgcgcaggttcagctcccgcaggttcgtcaacctatacacgttcaagcgtcgtccttgcccaagtgggtttcccgacaaatcaaggcttctgagttccgtcagctcagccagtcgttcctcgtccacatagttgaaccgcaggtggttgttcgacagattgagcactgccaggcgcgcgtggaggtccagattgggcagatgagtgagtcgattaccattgagatagagaagacgcagcgccggaaagctgaaaagaaagcgctccggcaacgtcgtcagtcggttgtttctcacgctcagcatagtcacatgagcaaagtgcgcgcgcagggtcggcaagcttgccaaatccagatcgtccaggttgagttcctcggccactccctgagtgaaaccttccttggcccagcaacgctgaatccgctcaaccgccaaggctcgtgaacgggccgatgcgcggtccggctggactgtcgacgcctgatcccgccatgtttgcaagtccctgtacagccgatcacgctccttgacctgatagttgatcaagtcttctcgctctttgaccgtgtcgtgcgcctccgcaagcatcgcccacacctcggcatccgttttaaaggggtacaactcgcgcatgcgcttgatctggttacgctctgtcggcccgaattcggttccaccactgagtgggtagcctttgcgaccattgatcaggcgtggtggtgcgagcctcgatggcattggccgcatgttgagtgtcgattggattcccgaccaatcctgtcccaggcgggctcccatttccgcgcgcaattcctccagcgcgccggcatgggtgtagcccatcgcctgccgctcggccaggggcaatgcgccgagcaaggcctccaggaacggcgcgcgtgcccccaccgcctgcaagctaccatctgcccgttggacgtaggccaggtactgtccgacgctcggtttcaagacccgtcgaaggtcagcatcatcgggaccgacgctgtcgattacgcggtgggcatcccagagttcaacccgcagcgatgtcggccagcccttgagaccagccagttcatggagcatcaaccgagaactgtcgtcattcgccaacggcgacaggtgcacgccttccagggcaccacagacccgcaaccaacgggaccaccaccgcgcctcatgcgccaaggtgtgcggtacgcgcccctcccggaggcgctccaactcagacgcagaagcatgttgcacccagtcctgcgcaatccccacggtcaatccagggaactgacgcactatcacctgtaccaaagggtcatcggaccgctggttcttgcggcgcagcacatcgaaaaactgcgcgtgcatctgcagtttgtccatgtgcaccttgctctccagggccgcaacctgatcttcacgtgcaagacccgccttaccgaccaacgcatcggcattgtcaggcgttatttcatcgagcacctggacaataaactccgaccccatctccagtccttgcttgacccgctcaaagatattcaagcgttcgaacgtctccaccaaaagcaccggcggcggttcgctgcgcatatgcaccttgcgcagtatgtccggcgtcacgccgctgatctgctggaccttgtcgatggcatcgggggtcaatgtgcgaaacctgggacccaggcggtaaaagggtttatgcccgttccaggtcagcgggttctcccattcatgccgccacgcgcccgcgccgttatggctcagcagcggcgcatacgcgtcgtccagggccggatggcggatgcgccaggggcgggtttgatcctcctgggtcactttgaaatattggctatcgatgaacaaatagcggtccgactccagagagtacaaccccaaggcatcgggctcgggtgcaatgcgccgggtgtcgacgtcactcgcgtactgcgcgatgtcgcgcagcaccgggtagaacgtgccttgcggtgcacgattgcgcagcatcgcctgggccacttgatgacgaaacccagtgatggccgcgggcatatcggcgccgaaccgggcgcgatcgtgatcggagagttggctcagtagcacccggaaaaacgcatgcgcgccaccctgctgcacgccggcgccctggctgcccggatcatagggcgaaaactccccatcaccatggtcgaggatcaacacggcatgcttgtcacgatccaggggagcgtaggttgacgggcggacaatcagttgcttgccgatagtcctcaaggcactgcgggcaaacgcctggacccaggcctgggtttgcggatcaaacctgcggcggtggtagatgcggtcaatgagggcctcggcacgcgccatctgcgcggcaaccttgagcgcatcgtagagcggctcgggttgttgtcggacttcaagcaaacgggtttgctggtcggccgacagcggatgctgatccagcacctccagcaacctcggcaggctgacgccggggtgcaatacgcgcagcgcctcgatcacctcgggcaccgggtagtcatgcccaaggctgtcaggcaaccatttacatacggacaccgaagcgcggatagcgctcgagcgatgggtgtcggcaaaccgggtcaaggcttcgaacagatcgaaccgcgacgcctgggcctgggccgccagttgcaaacggaccgcctgttcgccggcggaaaaactcgagggtaaaagttgtaccaccgcgtcggacaggtgcgcggtgatgcgctgcggtgcagagtagccaaactggtggttctccagggcggtaaccgtgatcacaaccgtcgtcgggcgggtcgcatccctgctgtagcgacgtagctcctggccctgtgtgttgacgattctcaacgccgtgtccagcggccacgccggcagctgggtcagcaacgggcccaggacttcgaatgcccccatgggcactggccggttggaatcgaccgagttggcggcccagtcaatcagccggtcggcgttgaaccgatgcgccgcctccaccaacgaggctgatgggcgtgcgcctgcccagacacgttccaattgttcgcgtgatgtgccgctggtttccagcaaggcctgcagctcatgcgcaggcgcctgggagggcagcaacatgcgctcaagcaactgggggctactcagccccgtactgtccttgatgctggcggcgggcatttgcgaaaggcgttgatacaaggcttgatggcgccgccgtacactgaatgccaggcggctatgcagccgcccgctgatcagcaggtcggccaagtcggaaaaggccagcaccagttcacctgcatgcccctccagcacactggacaagccattgagcaacccttcacccagcgccacgaacaacgcgatcgcccttacacgcgccaaccccttgagcgggccgggaaccggcatcagcaatagctccagcacctcgccaatcacagtgcgcgcaataccggcaagggtcgtcagaacccccggcgtctcgttggccaggctcttcaggttagtgcgaatgcgcgccaggtggaggtcgcccaaactgacggggggggctttggtcacgaccttgcgggtatagccggtccggtcctccaggcgaggctcgaacacctcgagaaacagatcctgtaatgcctcggcaaaaggattaagcccgctttcacggatggcgccttgcctgagcctggtcaagcgtgcgctgtcgggctgtgacatgaccgcgtataaccacgccacccggccctgccggtagaaagcactgaacgccacataaaattcctggcaggcttcccggtggttgtcgaaatgacgcaggtcgcccccgcccggccgacggggaaagtaactgaacgcgcctttgcaaccatcaacggaaaacaccagatgggggatgttcaggctgtctcccggcggcctgctgagtatttgcccggtgttgccgataaattgaggcacccaaccgatgttgtccttgccgtcggggatgaacagctgcatttcctcgcagtgcccccacccctcctgctgctccagcgcttgcttgatagcgcggtatttttcccggtcgactcgggtggtgttcgagtctctcagggcttcaatcagggcgaactcaaactccagccgccccagtctcacaatcgcctggcccaacggcttggccttgtccaggttgtcgtcgagcagggttctgagttggccaccgagattgagctcgcgcaccaacgcgatgaaatcctcggggctgaggtcgatactgagcctgctggacattgccacgccgtcatggccggggtaatcccaacccgtcaggccgtcatagttcatgcaggcggcgtcccacagcgaaagccggacgaccttgggctcattggtacggtctgccaggtcgcgccgatgtcgacgagggccgaacgaataggtggtggtgatatgctgggctttggggtcaacctcttgaccggtgaggtctttgaggcccgttcgcaaacgctccaggctttggagttcaaactgtgtgacgaattgacgaacgtttcgttcgacctccgcctgggcctcgatcaacgcccgttgcaggcgtacatattcgcgctggccatcgtcatccagcccggccatgaaagcggcaaatttctcctgcaaggcgtccacggtttgcagggtcgcccactcgtcgcctgcgaccaagggcagcctcgctcgctgctccgccatgaacgccgccaacggatctgcctgctgctgtgtcgctaccggctcaatcatttcacgctccttgaaatgatcagcctatccactacccgtcgatggctccggtagctatgtagcgcattgattcagccatggttcttttcgaataccgctgcgcccatcgccgcgatctgcccctcgatcaacgcgtcgaacggccgcaacaatggctcgaaggaggtgggagcctccaatacctgcagggcctgcgcaatcgcctcgacggtggacaacgcacctggcgagggagccttgcgcagtcgataacgtgacacggcgtcgcccgccaatgtcacccggggcagcactgccagcaacgggttgaggtgcaacaacttgcgcgccttgcgccaggtgccgtcgggcaccaccagcaacagcggggtgtcgtccggcgcatagtgctgcaaaggttgtgcatcgtccgccggaaacaacagccgcgcctgataaccgggtggggtcaacaatgtcgccagatcgtcaaacacctcccccaccaccaactgcgcgttgttcaagcccagcgccgccagcctcgcggtgttcagcgcgtggttgacctcacttgggtgctgcaacagcagcacgcgggtgcggctgtcgaggctggggatcagcgcgcacaggcaatgggtgacgggccgtaggcagcgggaacattggggtctggacatggtgttatcaggcctggttgagctgggctttgagtagatcgcggaaagtctggatcaacggttcacggctgcgaccacggcgcatgatcatcgaaaacggcgcctggtagccgaaggtcgccggcagcaacacgcgcaaatcgcctttgtcggcccaggcctgggcatagtgctcgggcaggtagccgatgtaggcgccggacagcaccaggatcagttgcgcctccatactttccaccgttgccgcgctgtgcttgaagccatggcgcgccagttcggcctggctccagtagccgcgcccgaccatgcgttgctgggtgatgacttgctcgggaatacgccgctcgttgaataaagggtgacgggtgctgcaatacagccagtgctgctcgcggtacagcggcatgtagatcagcccgctcatgcggttggagaaggcgccgatggccaggtccaggcggttgtcctgcacgccgagttgcagctcgtagggactcatcaccgacaaatgcaggtgcaccgccgggtgctccaggctgtaggcgccgatgacttcggcgaatggcaaagccttgtcgctgacagtggagtcgagcacgcccaatttgagggtgccgcgcaactcgcctttcaacgcggcggcgtattgctcgaagccttccagttcaccgagcaggcgcaaggtctcctgatggaacagctcgcctttgctggtcaggctgaacccgccgcggccgcgatggcacagcaccaggcccaacgccgattccagctggctcatataggtgctgatggccgaggtggacaagttgagttcgtgctgggcattggcgaacccctggtgacgcacgacgctgacgaagatgcgcaggagtttcaggtcgggcaaggcgttggccatgggcggctccagaggcacacacaaaatcctgtgggagggagcaagccccctcccacatttaaacgcagtttaccccaggcattagtttagaaaaatctgaactaagtatttgcccctgccgattctttcgtttcccggtatttcgcagaatcaggccctaataaacaaaacaacgatgaggcactcccgtggacaagattttccaccaaccactgggcggcaacgaaatgccgcgctttgccggcatcgccaccatgatgcgacttccccacctgcaaaccgccaagggcctggacgctgccttcatcggcgtgcccctggacatcggcacctcgctgcgcgccggcacccgcttcgggccgcgtgaaatccgcgccgaatccgtgatgatccgcccctacaacatggccaccggcgctgcaccgttcgactcgctgtcggtggcggacatcggcgacgtggcgatcaacaccttcaacctgctcgacgccgtgcgcatcatcgaagaagcctacgacgagatcctcgaacacgacgtgatcccgatgaccctgggtggcgaccacaccatcaccctgccgatcctgcgcgcgatccacaagaaacacggcaaggtcgggctggtgcacatcgatgcccacgccgatgtgaacgaccatatgttcggcgagaaaatcgcccacggcaccaccttccgccgcgccgtggaagaaggcctgctggactgcgaccgcgtggtgcagatcggcctgcgcgcccagggctacaccgccgaagacttcaactggagccgcaagcaaggcttccgcgtggtccaggccgaagaatgctggcaccactccctcgcaccgctgatggccgaagtgcgtgaaaaggtcggcggcggcccggtgtacctgagcttcgacatcgacggcatcgacccagcctgggcaccgggcaccggcaccccggaaatcggcgggctgaccaccatccaggcaatcgagatcatccgtggctgccagggcctcgacctgattggttgtgatctggtagaagtttcgccgccctatgacaccaccggcaacacctcgttgctgggcgccaacctgctgtacgaaatgctctgcgtattgccgggcgtggcgcaccgctgatgagcacgcacgaggtgctgcaagccgctgccgagctggtggcggccttcgcccgcaatgaccgcgccgcctacttcggcgcgttcacggccgatgccagctttgtgttctacaccctcccccagccgctgctcagccgcgatgcctaccaggcgttgtgggacagctggcgtcgggacgaggggttcgaggtgctgtcgtgcacctcgagcaacgccgtggtcagcctgcagggcgacgtggcgatatttatccatgacgtggccaccgagctgcgcatgaacggggagcaattcaaaagccaggaacgcgagaccattgtcttcacacggcaaggatctggcgcacaacaaaaacaaggccggtggctggcctgtcacgaacatttgtccgctatgccggaagggctgccgcccccttagccaatgtgatcggagctgatcatgaataataaaaacaacgataaaagtattcgaaaaatagaaaccaacggggtcgagcagatcccggaccacgaacgtaccgccggccccaaggatctgttccgactgatcttcggcggtgccaatacctttgccaccgccgtgctgggctccttccccgtgctgtttggcctgtcattccaggccggcgtctgggcgattgtgctgggcgtgctggtgggtgcgctgatcctggcgcccatgggcctgttcgggccgatcaatggcaccaacaacgctgtgtcttccggtgcgcactttggtgtgcacgggcggatcgtcggctcgtttctgtcgctgctgacggcgattgccttcttctcactgtcggtgtggagttcgggtgatgcgctggtgggcggtgcgaaacgtctgatcggcctgccggaaaccgacctgaccctggggctggcctacggggtgttcgccattctggtgctgacggtgtgcatctacggctttcgcttcatgctgtgggtcaaccgcattgcggtgtgggcggcgagcctgttgttcctgctgggtatcttcgccttcgcgccggctttcgacagccacttcgcaggcaccgtcgcgctggggcagaccggcttctgggccgccttcatcggcgctgcactggtggccatgagcaacccgatttccttcggggcgttcctcggcgactggtcgcgctacatcccgcgtgaaacaccgaaaatgcgcatcatgctggcggtggtcctggcacaaatcgcgacgttgatcccgttcctgttcggcctggccacggcgactatcgtggcgatcaaggcaccggactacatcgcggcgaataactacgtcggcggcttgctggcggtggcaccgacctggttcttcctgccggtgtgcctgatcgcggtgatcggcggcatgtccaccggcaccacctcgctgtatggcaccgggttggatatgtccagtgtgttcccgcgcctgctgtcacgggtcaaggccaccttgctgattggggtgatgtcgattgccttcatctttatcggacgtttcgccgccaacctggtgcagagcgtgtcgaccttcgccgtgctgatcatcacctgcaccacgccgtggatggtgatgatgatcatcggcctgatcgtgcgtcgcggcttttactgcccggatgacctgcaggtattcacccgtggagaaaccggcgggcgctactggttcagccatggttggaactggcgcgggctgggggcgtggatcccgagtgcgctggtgggcctgtgcttcgtcaacctgccggggcagtttgtcgggccactgggcaacctggccgacggcatcgatatcagcctgccggtgacgctggggctggcgtcggtggtgtacctgaccttgctacgcatgttcccggaaccggcggccgtctacgggcccgccgaccctcgcagcaagcgcacggatgcgcgcgttaaaccggcgctgcaaccagccgcctgatcgcccataaaaacgataatcggagactcgccgtcatggctttggatttattcgtcgtactcatctacgccgccggcatgctcgtgctcggctactacggcatgcgccgcgccaagacccacgaagactacctggtggccgggcgcaacctgggcccgtcgctgtacatgggcaccatggccgccacggtattgggcggtgcgtccaccgtcggcaccgtgcgtctgggctacgtacatggcatctccggcttctggctgtgtgccgcgctgggcatgggcatcattgcgctgaacctgttcctggccaagccactgttgaaactgaagatcttcaccgtgacccaggtcctggaaaaacgctacaaccccatggcccgccaggccagtgcggtaattatgctggcctacgcgctgatgatcggcgtgacctcgatcctggccatcggcaccgtgttgcaagtgttgttcggcctgccattctggatttcggtgctgctcggcggtggcgtggtggtggtgtactcgaccatcggcggcatgtggtcgctgaccctgaccgacatcgtgcagttcgtgatcaagactgtcggcctgatgtttatcctgctgccgatctgcctgtaccgcgtcggcggctgggatgagttggtcgccaagctgccggcgtcgagcttcagcttcaccgccatcggctgggacacgatcatcacctacttcatgatctacttcttcggcatcctgatcggccaggacatctggcagcgggtgttcaccgcccgtgacgaaaaggtcgcccagtacgcgggcaccttcgccggtttctactgcatcctctacggcctggcctgtgcgctgatcggcatggccgcgcacgtgctgatcccggacctggacaacgtcaacaatgcgtttgccgctatcgtcaaagcctcgctgccagacggcatccgtggcctggtgattgccgccgcactggccgcgatgatgtccactgccagcgccggcctgctcgctgcctccaccgtactgaccgaagacctgctgccgcgcctgcgtggcggcaaacagtcgagcctagccgtcaatcgcctgttcacaatgctgaccggcatcgccgtgctgggcatcgccctggtggtgagcgatgtgatcagcgccctgacgctggcctacaacctgctggtgggcggcatgttgattccgctgatcggtgcgatcttctggaagcgcgctaccacctctggcgcgatcacctccatgaccttgggctttgtcaccgcgctggtgttcatgatcaaggatgggctggatgcgaacacgccgatctactacagcctggcggtggggctggtgagctttgtggtggtgagtttgttgtcgcgtcggccagaaggtgtagcggccagcgcggtttgagaaaaagcgggttttagaggggtttcttcagcgggcgcgacgtcggatgtcgcgcccgtttttttcactcaaccgccaggttctggtttgcctggatgatctcctggaccagggaggcccataccagtccttgggttgtgccgccggcgtaggcttctccggctgctacttggtgatgggcgcaacagtgaactatcgaagttccgtcctcctcactggctataacgacgaagtgccccctgctctgctcggcgatctgaacccgactcagaaactgtgacggaaaccgaaccccggagcctctcaaaagcgcctcgatctccttcttcaaatggataagttccaggccgtagcccggaacctcaacatccctagcccgcgcgaatggtgcgagcgtcgggttgtcagccagaaacttttcaaacagctcgatacctgcacgattgcactcaacggccaaatacggatcggcataactggcgccatcgctcttctgatctcccccatacacggtgacctgataattcgccaaccggagcattacggcctggaacaggccattgatgcctctgccgataatcgatacacgcggcgcactggaatctaccggcagagaagggagcgtcaatgattgtgcaagtttacgcctgaccagaccgcgcaaggccgtcaaactcagctgtattgaaacggcatagtcaaggtcgcgctggcaggcctcggtggttgatgcctgggtagtgagcgtcgcaggcctgtaccaggtggagacctcgcagccgagcgtctgcgtgcgttgccggaacgcatccaatgtcgcaggcccataatccaataccagctggatatgttcagcctcggccagggcatgcaacgcaccgtcgctgaagacgtccggcttggcgacacagatcaggcgggcttggctgtgcaggcactgaatgcgggcctgatcaaggcgatgaacggactcatcattgagggatacgcacactgccacagcagcggcgccctccaaggcctcgaaccagtccacgacaaatgacactcgactgtcggaagcggcattcccgagagtatccggcgctcgacctggccggaccagcactctgatccgaacatttggatctcgatcaagcaacaggttgaccagttctttccccacattgccgtatcccagtacacgcacgtcacggggaatggaaccatcagccagtctcagccaacgcaggatataggcggccacatgcggcgcattcacccctggggtgttgagtacttgaatggcgtgggattcacacaggtccagtcgtatcttgtccaaactcgtacccctgcggatcaaacagaggtttccaaaggggtgggaggtacgccattgctccaggacatctgcatcgatgggttggtctccaacaatgatggttgttggacgcaggagcgcgatctgtatcagcagcgcctgcctggtcaatgccggcgaaagaaacacgacgtttctgggtgcctcggccttccagcttttcgacacaggcgcagcctgtaaaacacagtcggtggtggtgatgagtgacgcggcgaccggaggaactgaagagagcaacatagctttgtctccaacaactctgactgacacctcgaaaagaggcactcaataacgttggggcgctatgaagaggcgcttgagtttcaagctatgggtatttctggaattggataagccagccgtttccgagtgacaggtagtccgattccgacaatcgaacgccaagggctgaccggcagacccacagcgcttgctcactcctccccgctgctgagacctttaaacaaatcaacacaatccttacagccgaaatattgctcgactgccgggcattcgatctcccctgtcgcccccgccctcacccgccacacacacgccttgccatgatatttcagtgtgccttcaaggtaacaaggcgcccagtcgtactcgtcatgcagcgtgcctccatcaatgggctcagcacgcttgaaaaaggacgcgacctgtcgctcatccagcgcaacgtcactgggtcgacagcgttccggctcttcggagtaaaagcccaaaagggcaatttcgtcgatatcgggaggggaagtcgtgcatccggcgaggaatacccacacgccaagtgaccatcggcgcagactcattgccacaccgcactgctggcttcgccggggtgtttgtaagagatttgcggatgcctgtagacgtcctccggcgtcaggcggaaatgaccatataactcccccaccagccatcgcagagattgactctgcatcgcggtcacttcctcataacgtgcagcatccagatgcttgccgaccaattcgatgcccagggaatccgcattcatcgggaatcgctcaggatagcccttggtgcgttcataccgatccagcgcgcggatctgcaaggtccaggtgagtgcttgaatagcttggattcgggcggggtcgcacgtcgccttgtccgttgccatgcacctggagcgcaggtagcggccaacgtgataacaacgtttcttgaggctggccgtctggtagatcacaccatttttctcaatgagaaagtgtgctccgttgccttttgcaagataggcgttaaaggtgtgctgggcggtcggggcatctgtctggtgaatcaccagcgcgctcacgctgcgcaaatccccgtgctcgatcgattgaaaccgacggagttcgactctgtcggcaatcaacatcccttcgctatcaatactcgacatgccactgcccattcatccatgtgaaggcaaaaatatagaaggacaaacagggaaaagggcatggatgacgggataagaagaaggctctgacgatgacacgtgcctcgtcagacaattgggcacactacccaatgaacgggaatacagtctgattacagggaaccgaacacgccctgaagaacaacccagccatgagcgcccgcgcgattcaatcgcgtgagcgcttcaggacttacctgcgacgtggacgacgctgctcgtcatctgtgcgaatcggtaccggctgcagcggaggctcgatcaagcccaatgcaacacccaggtcatggagccagttttgaattttctctttcatggttgccccctttgagggtaatgcgggtaggcgcaagttctgtcgccctttcctacagtgatagtagccctaagtcctacgtattgcttgaacgaaaacacaacgaactattactgaattcatcaaaatcctgccggatcgctcaagcaatggcgcgggtgtcttgcacaaccgcagccttgccggcttgctgcaggtcgatccatgcgttgaggttagcgccgagcataccctttcgccacatcagccaggtggtcgcagtggcaaaaggccctatcagcggatgaacggacacgctgtccttgccgggcaggctgtcgagcatggactcggacatcaacgccacacccgatccggcgatcacgcaggcgagcataccttggtaagactcgatctcgatcgcccgccccatggccacgcgctcgtgggaaaaccaggtctccaggcgggtgcgataggcgcagctgcgacggaaggtgaacactgaacgccccgccacatcctgaggtccacgcacgggcggatgatcggcttcgcaaatcagcaccaggcgctcttcgcacaaggcgatgccgtccagggaggcgatggtgatgggaccgtccacaaaggccgcgtccaggcgaccggtgatcaacccttcgagcaactccccgctgggcgccgattgcacctgaaggttcaccatcggataagccttgtgatagcccgccagcaacttcggcaaatgcaccgcggccgtgctgtacatgctgcccaatacaaaatcgccagccggttgcccaccttgcacggcaccgtgggcttcgtcatgcagggcgagcagacgggtgctgtagtccagcagcaccttgccggcaggagaaagctgcaagcgttggcgctcacgcacgaacagctctacgccgagctgctcctccatttgcttgaggcgcgtcgacaggttggacggcacccgatgcaagcggtcagccgcacgggtaatggagccctcttccgccacggcctggaaaatgcgcaattgactgaactccatgactttctccaaaactgaacaagttactcactattattcaattttacagaaagtcaatccgtcttagcctgagggtattcgcttacctgcaggaaacctgaccatgtctcccctgattcgcttaactgccagctttgtcgccttgatgatggcgatgggtattggccgcttcgccctcaccccgcaaatgccgcacctgctcagcgaagggcagatcgacttgactggtgcgggcctgatcgccgccgccaattatctgggctacttcgtgggcgcggtggattcgatcttcgcgcgcagccatcaccacgtgcgtggccgtttgtatggcgggttgtggctgtgcgtgctgctgaccctggcgtcgtactgggcccatggtttctggccgcatctgttgctgcgctttggcaccggtgtcgcgagtgcctgggcattggtgatgatcaccagcctgagccagccgctggcgatcgccgccgggcgtccacgtctgggtgccttggtgttcgccgggccggggctggggattctgttgacggggctgctggcgctgggctccaacctgttggggcaaagctcggcaacgctgtggctggtgtacggcgtcgtggcactgctgatgttgctggcgattctgccgttcctgcccaagccttctgccgccggcgctcccattgccagccatagcgagacgggcagcaacggcagcatcgcgcatttgtgctggatctacgtgttgtacggtctgggctacatcatcccggcgacattcctgtcgcagatggccagcgcacagttcaagggcgcctggcaggctgacctgttctggccgtgcttcggcctggcggccgcgatcggtgtggtggtggcgaccctgcgccgcaaggacccgaacaccacgcgccgctggttgatggccacgctatggctgcaagcggccggggtgtttgcctgcttgctgggcaatggctggggcctggcactgggggtcctgctgtgtggcgggccgttcctggcctgcatgcagttggtgatggcccggctgcgggacgtcgcgccccatggctaccagcgcagcaccgggctgttgaccgccagctttgccatcggccaattgagcgggccgttgctggcgtcggtcagcagccacttgagcggtggcctgcaaccggcgctggtggtcgctggagcaggcttattggtagcgggctcggtgctgatcaaccggcaaccagcggcgcaggcacacgcacctgttcacgccgcgccagtaccaggaaaaacagcccacccagaaagcacccggtaaaccaggcaaaattggccatgccctgcaaggccggggtgaaagtgatcgccacgcccaccagcgtcgcgggcaccaatgccttgaccgccgtccagttcacgccaccgtcgaagtagtagcgcccgctggggctgtcatcgaacagtgcatccacgtcgatctgctgttttttgatcaaatagaaatccaccagcaggatcccgaacagcggcccgataaacgccgcgaggatgtctagggtgtagtggatcatcagcgggttattgaacaggttccacggggtgatgaagatcgacgccacggcagcgatcatcccgccggcgcgccagctgatcttgctcggcgcgacgttggcgaagtcaaacgccggcgagacgaagttggcgacgatattgataccgatagtcgcggtgacgaaggcaaaggccccgagcaatacggccatgctgttgtcgatgcgcgacacggtggcgatcgggtcatgcagcatttcaccaaacaccggtaaggtgcccgagacaatcaccacagtcaccagggaaaacgccaggaaattcaccggcagcccccagaaattgccgcgtcgtacgtcctgcatgctgcggcagtaacggctgaagtcgccgaaattcaaggtcggcccggagaagtacgacaccaccagcgccgtcgccacaatcacctggccaaacgcctgccagcccgacagggatttttccgccagggtaaagctgatgttcgaccagccggccttccacacgatccaacccgccagtgcaaacatgaccgcgtagaccaccggccctgcccaatctataaaacggcggatggactccatgcccgcccagaacaccgccgcttgcaacacccacaggctgaggaaaccaaaccagccaaggtaggacaggcctgcaaaatgcggctctgcatacaccgccatctgtgggaagaagcgcagcaccacgatgatcaaggcactcgacgccaggtacgtctgaatcccgtaccaggccacggcgatcaagccgcgaatcaccgccggaatattcgcgccgaacacaccaaacgccagccggcagatcaccggataaggcaccgcagcctgctggctcggcttggccaccaggttggcgatcaactgcacgatgcaaatgcccgtgagcaacgcgatcaacacctgccaactggccagccccagggcgaacaggctggcggcgaacacatagccgccgacgctgtgcacgtcgctcatccagaaggcgaagatgttgtaccaagtccacttctgcggcagcgggcccaagtcctggttgtacaggcgcgggctgtagcctttgggcaattgttcggtcatcgctgggctcctcgaaatacccgcctgcgcttccgtcgcagggtgcatacgggaggcggcatggtttgtatacgagacagtcagcagaatgcgtgccaattgaacgcaatccctctggcacggcgctccaaagggttgataagcgcgtatagggtggcgctacgctcagcaacggtgcacgtagatcctgtacacaatcagcggtgcactcgttgtgcacacaggtaacccaccgtgcagcatgcggcggtcaggaacgtcccccatgccatgtccatgatcgccaattgcgcggaccagccttgcagcgtggcccagttactcaggtcataggtgccgtaggcgaccaggccgagcaaggcgcccaggcgcgcggcgcgttgccaacttgcactgggcaagaccacgaacacgacgcaaccgagcacataaaggagatagaacagcgttgccggcaacagccgaggttgatccagcatcagtggacccaacagggacttataggtgggccccatgatgacgccgagccagaggccatccagaatcaggaaggcgagcaacgtgccaaggtaggcgaacagcgttttcttattcattgaggcgacctctgtagacgccaatgggcgcctacagaagagcaaaacgcactcagcttagttcaatgcgatccgcatggatcacgatctggccctgcttatacagcgcaccgatggccttcttgaagttgcccttgctcacgccgaacaagttgctgatcaccgcggggtcgctcttgtcactgaccggcaaggtgccgttgttttcacgcaacttggcgaggatcttcgagttcaggctggaggccgcttcctggccgaccggttgcaggctcaggctgatgttgccgtcggcgcggatctctttgataaagcctttttcttctttgcccgggcgcaggaacttgaacacttcgttcttgtggatcaggccccagtgcttgttgttgatgatcgccttgaagcccatgtccgtggcttcggccaccagcaggtcgacttcctggcccacctggtagttggccggtgtcttgtccaggtagcgatccaggcgcgcggtggcggtgatgcgcttggtgtgcttgtcgaggtagacatgcaccacgcagtattcaccggcggtaagctggcgcttttcttccgaatacggcagcagcagatccttgggcaacccccagtcgaggaacacgccaatactattgacttccaccactttcaaactggcgaattcgccgacttgaactttgggtttttcagtcgtggcgataagtttgtcatcgctgtccagataaatgaaaacattaagccagtcttcatcttcactgggaatatctttggggatataccgattgggcaagaggatttcgccatcttgcgcaccgtccaggtacaaaccaaagttagtgtgtttaaccacttgcaagctgttgtagcgcccgactaaagccatgtccaataccctcattacgtgggcggcattctacccgagttgcgctcgccacgcgcgcgcgcctgaaaaatcgcgggctggcgtggccttccgatggcagtgccccgctcgtccgatcaatcggctgaattttccatggttggcaagcgccacccgcccccatggtttcgagttaaaacagtaagttaggggcttattgataagatgaacttcggcgatttccggccgccgtacttattctcaggggatatttaccaagcaattgtcaagtatttcctgtacgatgcctggccaagttaattttctacaggttagtggccgccatgcgcgtaaaagcatccaacagcaaagcaaagccagctcccgccgttgaaaccagcgagtcgatcaacagccagattgcggcgttcctcaagtccggcggcgaaatccagcaaattgccaagggcgtaagcggccagactttcggcccgtccaagcagatcagcctgggtaaaaagtaataccgcgcaacccccctggtccctaagcgtcttgactctcaaggcgctaggactagagcccgaaataccccttctgtacctctaatcgacgaacgggcctcaccgcctggcattcgccggtatgcttgcacacgtctagcacgggcatctgcccgattttctccgtcactgctcctcgcttttcatggagtgaagcatgttcaaaccctgcatcttcctggtctttgccctggttgccagccctctcgccgaagcgcagatcttccagcgcgaattgggcgacttcgacctgaaattgggcaccacgcctagccgcagtatggcccaaggcctggtcaagccaacctcccccggcagtgactcgttccatggcgggctggacctgagccacgacagtggcctgtacttcggccagttctcaccgaacatgggcttgtcttcgtccagcaacctcgaagtcgattcctacatgggtttcaaacaccccttcgaccagaccctgggctacgaagtgggcctgatccactacagctaccccaagctcagccctctcgacagccaggagttctatggcggtctgaacctgttgggcaaccgcttcggcgcatccttcagcaacgaccctgaccgccaggacagtaccctgttcgccgacctcggtggcacacagccatttggcattggcgtcagcatgaaatacaccacccatcagttgggcaccccggtgtcggtggacggcggctccattcgcagcttcagcgactggtcggtgcaattctcccgggaatggatgggcgttgacctgaacctgatctacagcgactccagcctcagcggcggggattgctcggcctattccggacacaattcgcaatgcgatggcctgttgacgctgaaggccgcacggtcgttttattgatgggctgaactgtcgcacccggcgcaggttcacatgtgatatcccactctgcgaaggacccgccatgctgcgtcggctaaaactactggtgctgttgctgaccctgagcctggtgctcgccggctgcaatcgcgtgggcctggcctaccgcaatctggacgtgatcatcccctggaccctcaacgactacctggacatgaacgccgggcagaagagctggttcaacgacaccctcaagcagcacctggcctggcactgcaccacgcaattgccgggttacctggattggctggaccgcctgcaacagatggccgacgacaaccacgtcaccgacgccgccttgcaggcccgtaccgccgaagccaagcaggccatcgacgacatcgctcgagagatcactccctccgccatccagctgcttcaaggcctggatgatcagcaggtcaaggacatgaacgacgcgctggccaaggacttgcgcaagcgccaggacgaatacctcaagccgcccctggcccagcagatcaaggaacgcgccgagcgcatgagcaagcgcctggacgcctggatcggcccgctcagcgccagccagcagagccgcgtgaccgcgtggtccatcgccctcggcgagcagaaccgggaatggatcggcaatcgcgcccgctggcaggcgcaatttatcgaggctgtgcaacagcgccgcagtgccgatttcccgcagaagatccagcagttactggtggaccgtgaaagcctgtggaccccggagtacagagcggcctacgcccagaccgaagcggcggcgcgcagcctgattgtcgatgtgatggccgaaagtacgctgcaacaacggcagaaactcacccagaaaatcgacaaggtgcgcagtgatttccaggcacttaaatgcttgaagagcacgcagtcctaaccgggcgccaacgtccccagccaagccaccagcgccaggatcaacaccactgcggcagactccaacacaatgctgcggcgcagtgctttgcttgccacggtaatgtcgcccgccgccagggcgcgttgcagcaacggcgtgaagtgcgagcgattgagcgccgccagccccagcatcaaagcgaacaggcccaacttgaaacacaacaggaccgcgtaggtgccaccggtgatgccatcgagcttcggcccgaccacaaacagataattcgccacgcccgtgccgatcagcaccgctacgaacagcatgcccatccgctcgaaagccgccagcgcgtgtgccaacctgtggagcgtcgacaaagacgtgctcctcaacgccaccccgaatgcagccaacgcaccgacccaacccgccgccgccagcaggtgcgcactgtcgctgagaacgtgccataccccctgcgtgccttcatgcatcacgccgtgccccgcccacgccagcgttaccagcgctatcgcaccgaacagcggtgccattcgggtattgagcgcaaccagcgccaacgccaccattcgcaggcaccaggtccaccccagctcggtctgccagagcatcatttgcaggtgcggccacaacatttgccaatcttcggcgccgctcatggcctgggtcatgaacagcaacgacgctaccgaaagcaatccacccaggcacgcagtcagtcgcaacagcgactgcagattcaataggcggcggtcgccatagaggccgaacaaccccaggccgaacaccagcatcaagtccagataaagcgcaaaacgcaggagtatcgagaccgcttcactcatggctggacgctgaacatcacattacccaggatcgggtgcgtatcggacgacaccgcgcgccaatccacccggtaagtacccgccgtcagcgcggacgccggcttgatcagcatcaccttgggatcggtactggccgcgacactggccttcaccggcatcggcgaatggaacatgccgggcatgtcagtcatggtcagtttggcaccggaaaactgcgtcagcaggttttccgagaagcgcagttcgatcacggccggcggcgcccccttggccccatccgatggtgtagacgacagcagcttcggatgagccgataccgccaggctggtaatcagtccggcgcacagcacagtagttttcaacaatgacatgcaaggctccaggccgctcatggcggcgagtaagttataggatgggtaaaaccgtcagaaccacattcgcacaccaaccacccagcgccattggctgatgtcttcgccttcatcccgggcgtattgcgcggtctggccgtagctgcggttccagctgacgcccacgtagggcgcgaactcacggcgcacttcataacgcaacctcaagcccagctcactctccgacaggcccgagccgacgccgcgctgtgggtcgttgcgtccatagaagttgagttcagcggtgggctgcaggatcagccggttggtcagcaggatgtcgtagtcgccttccaggcgagcagcggtacgacccgcctcaccgacaaacaacgtggcttcggcttcgaagttgtacagcgccatgccctgggcgccgaaggccgcccaggtctggccgtcgcctggcttgaagtcctggcgcacgccgcctaccaggtcccaccacgggctgatggcatgcccccacagggcctggacttcggcgctttcagtgcgaccggcactgcgctcgccttcgctgcgtagccacaggcggtcgatatcgccgccgacccagccgttgatatcccagttcagcgcgcctgcaccgtcaccgccctgccattccaattggttgatcagcagcaaagagttgatgccactgtcgtgaaccctgtgcccaccgggggcgttgtacaccgccgcgcgatcagcatcggtcagggcaggaatcggtgtccggctctcggtgagcgccggtgacgccgggctcatgccctggaactcgtcggcctgcaccaacggagcgaacgccagcccgataaaggcgaataaaacacgatggctcatgcttgcgtccttactcatgcacgcgcacctctcggaacatgcccatttccatgtggtacagcaggtggcagtgataggcccagcgccccagcgcatcggcggttacccggtagctgcgccgcgagcccggcggcatgtcgatggtgtgcttgcgcacctggaactggccgttttcatcctccagatcactccacaagccatgcagatgaatgggatggctcatcatggtgtcgttgaccagcaccagccggacccgctcgccataggtcaattgcaagggttcggcgtcggagaacttcacgccattgaacgaccaggcgaacttctccatgtgcccggtgaggtgcagctcaagggtgcggctggggtcgcggccgtcagggtcttcaaaggtgctgcgcaagtcggcgtaagtcaggacacgccggccgttgttgcgcaggccgatgccggggtcgtcgagcttgggcaccgggttcatggcctgcatgtccaccagcgggttgccttgctcgctggccggatgggcctgcatcgacatggcgcggtgatccatgcccgccatgcccgccatgcccgccatgtccggcatatccgccatggcgccgtggtccatgccgcccatgcccatgtcgtccatggtgatccaggggcgcgggtccagcgccggcaccgacgcgattgctcccgcttgaagggccagcgtgccgcgggcgtaaccactgcggtccatcgactgcgcaaacagggtgtaggcggccgcggtaggttcgaccagcacatcaaaggtctccgccacggcaatgcggaactcatcgacactcactggctgcaccggctggccatcggcggcgatcaccgtcattttcagccccgggatgcgcacatcgaaatagctcatcgccgagccgttgatgaagcgcaggcgcagggtctcgcccgcccggaacaggccagtccagttgcgttccggtggctggccgttgagcaggtaggtgtaggtctcgccgctgacgtcggccaggtcggtggggttcatcttcatctgcgcccacatcaggcgatcggcggcggtggccgaccagccctgcttgcccacatcccgcacgaaatcgcccacggtgggtttgtgcaggttgtagtagtcggactgtttcttgagggttttcatcagcgcaaccgggtcttcatcggtccagtccgacagcatcaccacgtagtcacgttggtaagtgaagggctcgggctccctgggatcgatcaccaacgggccatacacgccctgctgctcctgaaaccccgagtggctgtggtaccagtaggtgccgtgctgcttgagcgtgaactggtagacaaacatcccacccggctcgatgcccttgaagctcaagcccggcacaccgtccatggacgacggcaggagaatgccgtgccagtggatcgacgtcggctcggccaggcggttcttcacgcgcacggtgaccgtgtcgccttcgcgccagcgcagcaaggggccaggcaggctgccgttgatagtcagcgcggtacggttgcgaccggtgaggttgactggcatctggtcgatgaacaaatcaaattcggtacccgccagcacggtgggctggccgggactggtgagcgcccagaccgggctgcgccagagccctagcccgctgagcaagccgccggcggccaggcctttgacgaaggttcgtcgggtggttgtggggtgcatgccgattcaattccatgagttgaatggcagcagattaagcacggccggctgtcagccagcttagcggcagattaccgatctgacagtttcgccccggctttgcgacagtgccggggcgtgaaggggatcaggcgatctgcgccttggaggccacctcggcaaaggtcgtcgggtcgagcgcatccgcctgctcgtccagcacctgacgcgggtgatcgttgcccggaatcgaactgtcgatcagcgccagcaactgtgcgccgagcggggtcaggataaaattctcaccattgccgccctcctcttcagggcgcgactcgatgaagccgcgcttgaacaacagcgcttcataatctgccgcggtcttcttgagcgcgtccaggttaccggtgggctcgcccgcggtggccttctcggccgcttcctgctcggcgtatttgcgtggggcgaagctgccctcgccgttctgcacttcatgcagcagacgttcgatcagatcccagttgtaagtcgtcatcctgattcctcctgcaggcgggtggaaaatagcctgtctaggggtgtgacacgccctgtcggtcaccgttcagccggatagacggacgtcatttctctgaactttccagacgttcgcggcctcaacagctcatatccgccaaggaggtgtgcccatgaaaaccctgatgaacctggccgtcgcggccgcgctgtttagcgccctgcccgcctgggcctgtacgcccgacgaagccacgagcaagcgcgagcaattggctcaggaagtgaccaggctgaccgaacagaatccgaccaaggccaaggagatcaacgacgaactgcagaagatggacctggatacggaaagcgcggagttccccgacaaatgccaattgatcgacgcccgcctcaaggaactcaaggaagccgccgccaaagccaaaaactgagggcataaaaaaaccggacaatcgtccggttttttcacatcacccgcgccttagtcggcagccggggcttccggcttgcggcgcttgagcggtgccatgccgtccttgctgacgagcgacaggttgtcggtcttcggccggttggcgatcttgcgtttggtcggcgacttggcgccggttttcttcttgtcgcccttggcgtcggtctttttcttcttcacaccaacggccttgcccgatgccttgaccttcttcggcccggtgtaggtgcctttgacttccttgatggtgcggcgctcgaacgactgcttgaggtagcgctcgatgctcgacatcaggttccagtcgccatggcagatcagcgagatggccaggccatcgttgccggcacgcccggtacggccgatacggtgcacatactcgtcgccgctgcgcggcatgtcgaagttgatcaccaggtccaggccgtccacgtccaggccacgcgcggcaacgtcagtggccaccagaatcttcacgccgccggccttgaggcggtcgatagccagcttgcggtccttctggtctttctcgccgtgcagcacgaacgccttgtactcctgggccaccaggcggccgtagatgcggtcggcggcggcgcgggtgttggtgaacacaatggctttctgataggtctcgttggccagcagccagttgaggatctgctctttatgcacgttgtggtcggcggtgacgatctgctggcgcgtggtcgcgttgaggtcgctgacgttgttgacctgcaggtgctcagggttgttcagcaccttggcgaccatctcgcgcagggtggaaccgccggtggtggcggagaacagcatggtctgctggcggttgacgcattcgcccaccaggcgctgcacgtcgtcggcaaagcccatgtcgagcatgcggtcggcttcgtccagcaccagcacttcgacttccttgaggtcgaggttgccggcgttgagttgctcgatcatgcggcccggggtgccgatcaggatgtccggtaccttgcgcagcatggcggcctggaccttgaagtcttcaccgccggtaatgatgccggacttgatgaaggtgaactgcgagaagcgctccacttctttcaacgtctgctgggccagctcgcgggtcggcagcaggatcagggtcttgatgctgacacgaaccttggccgggccgatcaggcggttcagtacaggcaggacgaacgcggcggtcttaccgctaccggtttgagctgtcacccgcaggtcacgcccttcgagcgcgagcgggatggccgctgcttgcacaggcgtaggctcgacaaatttaagctcggccacggctttgagcaggcgttcgtgcagggcgaattgggaaaacacgggtgctacctcgaagaaatacaaaaaatcagctgcataggttaccggtttcgggcgcccaaaccgagtttctttacgcgaacggtgctaatcggccgcttttttgtcaggacatttgtccacgacgtcaactttgttgcacttaaatgctctaatcgccccgtcttgtcccacagaagaatcggtttcacccatggatatcaaacagctctggctcaacgcccaggacctctggggcgccctcgatgaacacccgctgctgcacgccagcctcggcttgctggtgttgctggtggtggcgctggtgctcggacgagtggcgcgctacctcattctccacgccgtcaaactgcttggccggcaaccgtccctgcactggctcaacgacctgcggcacaacaaagtcttccatcgcctggcccagatgacgccgtcactggtgatccagttcggcctgtacctggtgccggacctgagcaagaccgccatcctgttcatcggtaacgtggccctggcattgagcatcctgttcctggtgctggccatcagcgccctgctcaacgccctgctggacatctacgcccgcaccgaacacgcgcgtacccgctcgatcaagggctacgtgcagttggcgaagatggtgctgttcgtgtttggcgcgatcattatcgtcgccaccctgattgaccgttcaccgctgttgctgctgtcagggcttggcgccatgtcggcggtgatcctgttggtatacaaggacacgctgttgtcgttcgtcgccagcgtgcaattgaccagcaacgacatgctgcgggtcggcgactggatcgagatgcctcaggtcggcgcagacggtgatgtagtcgatatcaccctgcatacggtcaaagtgcagaacttcgacaagaccatcgtctccatccccacctggcgcctgatgtccgaatcgttcaagaactggcgcggcatgcaggcctccggcggacgccgcatcaagcgcagcctgttcatcgacgccagcggcgtgcgcttcctgcgcgacgacgaagaactgcgcatgacccaggtgcacctgctcaccgactacatcgggcgcaaacaggccgaactcaaggcctggaacgaagcccaggggcacagcgcgcaactgtcggccaaccgccgccgtatgaccaacctcggcaccttccgcgcctatgccctggcctacctgaaaagccacccggacatccagccgaacatgacctgcatggtgcgccagatgcagaccactgcccagggtgtgccgctggagatctactgcttcacccgtaccacggcgtgggcggattatgagcgcatccagggggatatctttgattacctgctggcggtgttgccggagtttggcttgagtttgtatcagcagccgagtggtaatgacttgcgtgcgggggtgttgccagcggtgttgggggccagtcacttgcctgcaccagaaaaagccttgagctagaacgcttcatttccagggatgggctgcgtggcctgacgcttcgcagcctccctccagtgactccaatcgatcagtgcagtcggaagtcgatcgtgactttttatccagacacacagacctggatcgatccactgtacgatttccgtgatatcccgatgcagatcgaacagcggttgccacaggagcggctcatgatgaaaacaacgatttcgtagatcccgcgcattgttcagtcgactgcggatgacgtccgctttcttggcgttcttcgggcaatagaaaaataccttcatcaacggcttcgaaacatccgggaacgatttacggttgaacagcgaggtccagaagccaaagctcaactcggcggtaatgtcgtcaggaccagggtccacacctcttttattgagcgccgcacgtgcgtcgtccactttttgatagctggaaagaagctctgcgttagtgcttaccctgaaggcctcgtaccaatcgtcacgcccgtactcgcgtaccatctcgcgctgaatagcattgcgcagccccacttcaagcacgtgaaaaatcgacaccagggactctgcgatccgcatattgtgcacgtaggcagcggcagcgtgctcttggttgccctgatgccccataagatagcggctcattcgtggtgtggagagctttgcctccagtgtttgccagaccattacccgccacctcccttcagcgcaaagacatgtacaagcgcgagcgatggtgcaggcagattttttcgcctgaaataaacacactattgccaaacaatgcagccgacctacatcgatgccaggtggggttgacgtaaaaaccaaggctggtaatctcaccccgcagccctaggaacctccactcccgtgcgagatgaaacggtgacgagactaggttatgtgacggccccgctctgcggggcctcctcatttctggcgatccaacttttcgctacgactcgtttttcaccgcacgactgttcagttgatggcccaaccgactgatccacaccgcccccagaatcaccaacccacccagggccaaccgccccagcggttcatgctggttccagatcagcaaattcaacagcagccccaccggcacatgcaggttgttcatcaccgccagggtgccgccctgcaccaggcaggcgcccttattccaccagtacatgcccagcgctgtactgaccaggccgaggaacaccagcacgccccattgcagcggcgcctccggcagaaagttggctttgccgaacagcaggaatgccggcaacaccaccagcaacgcgccgaggtagaagtaaccgaagcgccggtagtgcggcagattgctcgggtaacgcgccaccaggtgtttgtacataacttgcccggcggcataggtgaagttggccagttgcagtagcaggaagccaccaaggaagtgcggggtgatctggtcgaagcgaatcactgcggcgcccgctaccgccaccagtgcggcgaccagcgcccaggggttgaagcgacggttgagggcgtcctcgataagggtcacgtgcagcggcgtgagaatggtgaacagcaacacttccggcacagtgagtacacgaaagctcagatacaggcacacgtaagtcacgccgaactgcagcgcgccgatcaccagcatgccgcgcatgaaggccggttccaccgagcgccagcgggtcagcgggatgaacaccagcccggccagtagcacgcgcaccagcacggcgaagtagctgtcgacgtgaccggcgaggtattcgccgatcaagctgaaggaaaatgcctgaatcagggtgacaaccagtaaatagcccatgcgcgcctcgtttcgaatgggcgggacattaaaggttttcggcggttgaagaaactcggggcaaaaaaaacccgacctcgctaaagcgtcagtcgggcggtagcactcaggagcaatagtgcaaagggaggttcgttacgcgtacttgaagggttggcgtgaagcgatataaacaccgcgcgattatgtgacgattaaaggatcaagccacctgagccagcagcgctttggcgtggttgatgcccttttcctggaagtccccgctcaggttcaccccttcggcatgaatgaaggtgacgtcatgaatcccgatgaaggccatgacctgacgcaagtacggttcctgatgatctgagctggcgccggtgtggatgccgccgcgagcagtcagcacgatggcgcgcttgccggtcagcagaccctgggggccggtggcggtgtacttgaaggtcacaccggcacgcaacacgtggtccagccaggctttgagggtgctggggatggcgaagttgtacattggcgcagccatcaccaggacgtcggcggcgagcagttcgtcggtcaatgcgttggagcgatccagggaggcctgttcgttgccattgcgctgatccgccggcttcatccagccgccgagcaggttggcatccaggtgcgggaccggattgagggccacgtcacgtacggtgatctgatctgccgggtgggcggcctgccattggctgatgaactgttgggtcagttggcgggaaattgaatcctgctggcgggcgctgctttcgatgatcagaacgttggacatggcgttgtaggctccatctgtaattgctgtaagtcgatggagtgaagattaaacagagccaattcgattaaaaagcgcaaaaaactgctataacccatctataaatttgtttataggcggagcatgctccgctctcgggttatttcggcgtgcaggccagggcgatacgcatcttgataatcgcgcggttgaacttgaccgtggtgttagtgcttttgcccgccggcaccgtgaccgtacggcgacgcggcgattccgggccgttggtgaaggtcaccgagcacacagcatcgtgggtgccgtagttattgagttggatcgagctgatatcgccgtccacgtcggaggcggtgtaatcgatgctcacaccgtcgatcttcttggtcacgtcgatggggtaggcaaacgcgctcatcggcagcagcgccagcaacacacaacagaattttctcattcggcagtctccaataaggacagccagcttaggacaagaggagcccatcttgaaagcgccccgcgttaccctcgatcaatggcgcacgctgcaggctgtggtcgaccatggcggcttcgcccaggcggccgaagcactgcaccggtcgcagtcctcggtgagctacaccgtcgcccgcatgcaagaccagcttggcgtaccgctgctgcgcattgacgggcgcaaggcggtactcaccgacgccggtgaagtgctgttgcgccgctcccggcaactggtgaaaaacgccagccagctggaagaccttgcccaccatatggaacagggctgggaagccgaggtgcgcctggtggtggatgcggcttaccccaatgcgcgtctggttcgcgccctcaccgcattcatgccgcaaagccgtggctgccgcgtgcgcctgcgtgaagaggtgttgtcgggcgtagaagagttgctgatggaaggcgtggccgacctggcgatctgcgggttcagcatacccggctacctcggtacggaaatgagcgatgtggagtttgtcgccgtggcgcacccggagcatgcactgcaccgcatgaaccgcgagctgagtttccaggacctggaaagccagatgcaggtggtgatccgcgactccggccgccagcaacctcgcgacgtgggctggctcggcgccgaacagcgctggaccgtcggcagcctggccaccgccgccgcctttgtcggcagcggcctgggctttgcctggttgccccggcacatgatcgagcgcgaacttgccgagggcgtgctcaagcaactgcccctggaacagggcggcagccgccaccccacgttctacctgtattcaaacaaggacaaacccctggggcctgccacgcagatcctcgtggaactgctgcgcacctttgataccgcaccgctggacgcgcctttcgccgccccccggcaagcctgaaacggagttcgcccatggcctggttcgaccatgaaggatgcagcctgcactacgaggaatatggtcacggcgcgccgctggtgctgatccacggcctgggctccagcagtcaggattgggaactgcagattccagtactggcccggcattaccgcctggtcgtggtggacgtgcgcggtcacggccgctcggacaagccgcgcgaacgctacagcatccagggtttcacctatgacctgatcgccttgttcgagcacctgggcctgccaccggcccacgtggtgggcttgtccatgggcggcatgatcgctttccaactggccgtggacgaacccgcactgatcagaagcctgtgcatcgtcaatagcgcccccgaggtcaaggtgcgcagcgctgacgattactggcaatgggccaagcgctggagcctggcacgcttgctgagcctgtccacgatcggcaaggcgttgggcgagcggctcttccccaaaccgcaccaggccgagctgcgccgcaagatggccgaacgctgggcaaagaacgacaaacgtgcttatctcgccagcttcgatgcgattgtgggctggggcgtgcaggaacgactttcgcggatcacctgtccaaccctggtcatcagcgccgaccacgactacacccctgtggcgcagaaacaaaactatgtaaaactgctgcccgatgcgcgactggtggtgatacaagattcccgccatgccacgcccttggaccaacccgaagtctttaacgcaaccttgctcgattttctaaagacagtcgaaaccactacccaggatcactgacccatgctgaaaaaaatcgccttctttgccggttctgttctgttcgccgccaacctgatggccgccgagcccgccaaggcgccccacgttctgatcaccaccaccaacggcgacatcgagatcgaactggacccggtcaaggcgccaatcagcaccaagaacttcctggcctacgtcgacaagggcttctacaccaacacgattttccaccgtgtaattccgggcttcatggtccagggcggcgggttcaccgcgcagatggcgcagaagccgaccgacgcgccaatcaagaacgaagccagcaacggcctgcataacgtgcgtggcaccttgtcgatggcgcgtaccaatgacccgaattcggccaccagccaattcttcatcaacgtcgccgacaatgcgttcctcgacccgggccgcgatgccggttacgccgtgttcgccaaggtggtcaagggcatggacgtggtcgacatcatcgtcaactcccagaccaccaccaagcagggcatgcagaacgtgccaatcgatcctgtcctgatcaagtcggccaagcgcatcgactgatgcctggcaggcagctccgcgcgcagcccacaaggccgcgcgcgcatttgtaaaaggagagcccgcacggcgggcgtcaaactgaatgctctatcgtcgctttgaacaactgatcgacatcttccgcgacgccccgagcgccgccccgcctgataaagtcctgcctttctacctctactacctgcgccaggtttggccgcattttgctgccttgctggtggtgggcctgatcggtgcgctgatcgaagtggcgctgttcagctacctgagtcgcatcatcgatctggcccagggcacgccgccggccaacttctttcagattcacagcaccgagctgatctggatggccgtggtcgccctgctgctgcgcccgatcttcggcgccctgcatgacctgctggtacaccagaccatcagccctggcatgaccagcctgatccgctggcagaaccacagctacgtgctcaagcagagcctgaatttcttccagaatgacttcgccgggcgcattgcccagcgcatcatgcaaaccggcaattccctgcgcgattccgccgtggcagcggtggatgcgatctggcacgtggcgatctacgccatcagttccctggtgctgtttgccgaggccgactggcgcctgatgatcccgctggtgacctggatcctctgctacagcctggcgctgcgctactttgtgccaagggtgaaggagcgctcggtgatttcctccgaggcgcgctccaaattgatgggccgcatcgtcgacggctacaccaacatcaccaccttgaagctgttcgcccatacccgctatgagcaggagtacgccaaggaagcaatcgtcgagcagaccgaaaaaacccagttggccagccgcgtggtcaccagcatggacatcgtgatcaccactatgaacggcctgctgatcgtgaccaccaccggcctggcactgtggctgtggacgcaatcgatgatttccgttggcgcgattgccctggccaccggcctggtgatccgtatcgtcaacatgtccggctggatcatgtgggtggtcaacggcattttcgaaaacatcggccaggtgcaggatggcctgaagaccatcgcccagccgctggccgtgatcgaccgcgacaatgccccgcgcctgagcgtgccccagggccaagtgcgtttcgagcaggtggatttccactacggcaagaagagcgggatcattggcggcctcaaccttgagatcaaggccggtgaaaagatcggcctgatcggcccgtccggtgcgggcaagtcgaccctggtcaacctgctgctgcgcctgtacgacctgcaaggtgggcgcatcctgatcgacggccagaacatcgccgacgtcgcccaggaaagcttgcgcgaacagatcggcatgatcacccaggacacgtcgctgctgcatcgctcgatccgcgacaacctgctctacggtaaacccgatgccaccgacgaagagctctgggccgctgtgcacaaggcgcgcgccgatgagttcatcccattgctgtcggactccgaaggccgcaccgggctggatgcgcatgtgggtgagcgcggagtgaaactctccggcgggcagcgtcaacgtatcgccatcgcccgcgttctgctcaaggatgcgccgatcctgatcatggacgaagccacgtcagcgctggactcggaagtggaagccgcgatccaggaaagcctggaaaccctgatgcaaggcaagaccgtgatcgcgatcgcccaccgtttgtcgaccattgcgcggatggaccgcctggtggtactggagaaaggccagatcgccgagagcggcagccatgccgaactgctggcccatggtgggttgtatgcgcggttgtggcagcaccagaccggcggcttcgtcggtatcgactgacccttacaacccctttccgatccaacctgtgggagggggcttgcccccgatagcggcagatcagtcaccggatacagcgactgatactccgccatcgggggcaagccccctcccacattagagccctggatttgtgccatagccgtgctgtactcagtgcagtgcccagacgggcgctgaagtaaatctgcagggagcatcactgatttacggatccggtagagcgatctatcaaggacgggttgcatgtctttgttcaagcgttcagtcacagaggggttaggtacgttttggctggtgttaggcgggtgcgggagtgcggtattggccgccgcgttccccgcagtcgggatcgggttgttgggcgtgtccctggccttcgggctcacggtgctgaccatggcgttcgccatcgggcatatcagcggttgtcacctcaacccggcagtatcggtggggctggtggtgggcggacggtttccggccagggagttaccggcgtacatcgtcgcgcaggtggtcggtggcacggtcgccgctgcgttgctgtacttcattgccagcggcaagccggggttcgaactggcgtcaggcctggcgtccaacggctatggcgagcactcgcctggcggttattcgatggcggcggggtttgtctgtgagtgggtgatgacggcgatgttcgtgctgatcatcctcggcgccaccgaccgccgtgccccgccaggccttgcaccgatagccatcggtttggcgttgacgctcatccacctgatctctattcccgtgaccaacacctcggtcaacccggcccgtagcacaggcccggcactgatcgtcggcgggtgggcgatccagcaattgtggatgttctggcttgcgccgatcctgggtgcggtgatcggtgggttcacttatcgatggctgggcaaggaggcgccgggttgaggcaaacgggttcagccctgccgataaggcagggctgcccttgcctcctgtgcatacgccacgatccccacccgttcacgctcgagaaaatcctccacggcattcttcaatcccggatggcgcaggtagtgccacgaccgcgtgatcaccggctcgaaccctcggatcaacttgtgctcgccctgtgctcccgcatcgaagcgttgcaggccttgggcgatggcgtagtccataccctggtagaagcaggtttcgaagtgcaaacggtcaaactctgccaggcagccccagtagcggccgtagaagctgtcgccgccgagcaggctgaaggccatcgccaccgggcgcgagccttgcttggccagtaccacgcggatcgcttcaggcatgcgctcggccagcaggctgaaaaaagcgcgagtcaggtagggcgattggcggcgcacggcgtaggtgttggcatagcaggcgtagacaaaatcccactgcgcctcgctcagttcatggccttgcaaccactcgaaatcgatcccctgccccgccacttgctcgcgctccttgcgcatctgtttgcgcttgcgcgaactcaaggcgtcgaggaagtcctggaagtcccggtagcctcggttctgccagtgatactgacagcccaggcgctgtaaccaacccggttgccgggccagtgcagcatcggccaggtcatcggtgaagttgatatgggcgctggaaagcccttcgatctccaggtaacccggcaggctcttgagcagctcaaaaccgtcttcggcactggcggccaatagacgcggaccgctgaccgggctgaaaggcaccgccgtcagcaacttggggtaataatcgatgccggcgcgctcacaggcatcggcccagccgtgatcgaacacgtactcgccataggaatgccatttgcgatagctgggcaacgccgccaccagccgctcaccctcccagtgcagcaaatgctccggctgccagcccgattgcgggcccaggctggcgctgtcttccaaggcgctcaggaacgcgtgccgcacgaacggctgcccctgcggcaccagcgcatcccaggcttgcggggcaatttcggacaggctgtccaggcgttgcagcggcatcggcatcctcactggttcggggcgtgaaagcctggcgagtatcgccgattgccgaccctggcacacccccgtttcgcacgacaaggctctaaaccaatagttccgaacgtgaaaaatttgtcatctagatgacatcacttcgccactgcgccgtcataaacgatcgtgatactgacgcctgtttttagagcgcctggttctacccggcggctatttttccgtccgtcatcggtcggttgtgtcctggatggtttgccatccctcctcactttcggagattgatatgcgtcttgcttccactaaaactgcggcggtcctgtgcggcggcctgttactggccctgagcgttccggccagcgctgcagtcgacgctaaattgctcgacatgctcaaggccaacggccagatcaccgcggcgcagtacaccgaactgcaaagcgagctggccaaagaccagaaagaacagcagatcgcacggcaagctcaacaagagaccaacgaacagatcgcggccaccgcgaagaaaaccaatgagctgagcagcttcgaccagaagctggcctgggccgccaagactcagttcaagggtgacgtacgtttccgtcaggaaaccgtgaaaatccagggcgaatccaacaacggcggccgcgacaaggaccgtcagcgcatccgtgcccgcctgggcgcctacaccgagatcaactcgcaagtcgacaccggtatccgcattgccaccggcagcagcgacgatgcgcgctcgaccaaccaggaccaggacaactatttcgacaagaagtcgatctggctggaccttggctacatcgactaccacccggaccagatcaagaacctgcacgtgatcggcggcaagatgctgcaaccgtgggtgaacatgggcgacgtcatctgggatagcgacatcaaccctgaaggcctggccctgacctacaaatacccgctgggcagcagcgccgagctgttcggcagcctcggtaactacaacctcaaggacaacgtcgacggcgatggcgtgcaattccgccacgacctgcgcctgacctctggccagttgggcacacgcttctcggtcaccgacaacctgaaaatgaccctgggcggcagcatctacgcctaccagaacgacaaggacagccgttgcacaaccaccaccacgccttgcgcactggcggtcaacggtaactcggccgacaaccagttccgcctgtatgaaggctttgcccaagccgacatcggtggcctggctgtaccgctggcgttctacggccagtacgtgaaaaacaacgacgccgtgaccgaccaggacaccgcctggctgatcggcgccaagtcgaaagtgttcggtttcaacctggactacaactaccgcgacatccagcgtaatgccgtggttggcgccttcaccgactcggacttcgccaacggcaccaccggttcgcgcggtcacaagatgaaggtcagctacgacatcgacaagaacttcgccctcggtgccacgtacttcctgaccaaggccgactacgccagccgtacccagcgtgacgccaataccaacaccctgcagctggatgcagaagccaagttctaacagtaagtgttgaaagccttgggccaggacgacccgaggtggctgtaccagtcttgcgtgagtggatcggtccccatcatccgttcgctccacccacgcgagcctgtttattccccgcctttgtgatccttgagccgctcgtcagccagacgctgcgccaaggcctccacaccctctaccggctcatccggcattatcttcagcgtcgcctgcatcaggcgcatctggcggataaaccggcggcagttcgggcagaacatcaagtgatgacgcaccagcagacgctcgcgaaaggtcaactgcccatcgagatagtcactggaacgtgccacttgttctttacaggtcaacattcgcccgtttcctcaaaatgctccaccgtggcgaagactttaagccgtgcccgatgcaacagcacacggacattggagagcgacaacgtcagaagattacagatctcttccaactccaggccctgccgttcgcgcagcaccagcacgctgctttgcaactccgacagactcagcaacgtatgctccaggcatttgcgcagttcatcttcggtgagcagggcttccggggtgtcctggtgccaggcgtagggggcgacggcccaatggccatcgtcaggcgtgaagcgatcatcaccgatggtgccgtggggcgaaggcagatcgtcgagcagcacttcgcgacgattctgcttgtagcgccccttggcagcgttggcggtaatggtcagcagccaggtcttgaggctggaacggccctcgaacctggccaggttgcgcaccaccgacagccaggcgtcctgcaccacttcgtcggcgtggcgctggccgacgatggcataggccaccgcccgcatggcgctctggtaggtggtgaccaattccttgtaggcccgctgctcacccttgagcaggcgttcaagcaggtgcgcgtcgtccgctgctgccattcaagacctcgattgtcttagcgtttgcgcaggatcacgctgccgatcgaatagcccgcgccgaacgaactgagcaccgccacggagcccttgggcaggtcatcctgattcttgtggaacgcaatcaccgaacccgccgagctggtgttggcgtaggtatcgaggatcaccggcgcttcttccaccgtggcttcgcggcccagcagtttcttcacgatcaggtggttcatgctcaggttggcctggtgcagccagaagcgcttcacatcggtcacgttcaactgattctcttccaggtgcacgccgatcagctcggccaccatcgggcatacgtcgcgaaacaccttgcggccttcctgtacgaacagtttgtccggcgcgccgatgccttcttccgcggtgcggttgaggaagccgaagttgttgcggatgttattggagaacttggtcagcagcttggtgctcaccacgtcgaactgatgttcggaggttgccaggtcggcgcgctccaggaccacggcggtggccgcatccccaaagatgaagtggctgtcgcggtcgcggaagttcaggtggccggtgcagacttccgggttgaccatcaggatcgcccgcgcctggcctagctggatgctgttggcggcgttctggatgccgaaggtggccgaggaacaggccacgttcatgtcaaaaccaaacccttcgatgcccaaggcttcctggacttcgatggcgatggccgggtaggcacgctgcaggttggaacaggcgacgatcacgccgtcgatgtcggcagcggttttgcccgcgcgctgtagagcttgttcagcggcgccgacggccatctggcagaggaccgaccattcgtcgttgctgcgctcgggcaggcgtggggccatgcgctgcggatcgagaatgccgtccttgtccatcacgaagcggctcttgatgccggaggccttttcgatgaaggcggcgctggattcggtcagcggctgcacgtcaccgcgctcgatggcggcggcgttgtcgctgttgaactgttgcacgtaagcattgaaagactgcaccagctcttcgttggaaatgctgttggccggggtatacaggccagtgccgctgatgacgacgttatgcacggtcgttcctctaaatctgtcaggcagaagatattggtaccgtcgtaccaaactgtaagtagtccgattccgctccgcggacaccaaactggcatcgctttattccatcgcgccgcagcctttcacgacgatcccggcatttataaccgcgaagtttgccacaaccctcggaatttggcgctatctgtgggagggggcttgcccccgatagcggtgggccagtcaacacatcctttactgacagaccgcaattgggggcaagccccctcccacactggacctgtattgccctggaaaccgtgtagatatcaggcttctaccaggctccactgcttgctcaaacgcttgtcggaaatcggcaccttggtgcccaactgctgggcaaacaacgacacccggtattcctccagccaccagcgatacagctccaactgggggtcgcgcttgccttcctgggcgtgttttttcagacggttttcgtactgcgtccacaggccggccagctcgccgctccacacccgatccttttgcacttggctcggcagtttttccaggcgcaactcgatggccttgaggtaacgcggcaactccttaaaccactgcgccggggtttcccgcacaaaaccggggtacaccaggttgctcagttgctgcttgatgtcgttcaaggccacggcctgggccaggtcgatcttgcctttgaagcgtttttgcaggccatgccagagtttcagcacctccagggtcaggcgcgccaggcgctcggcgtgttcggtccaactgctgcgtttgcgctcggccagggcagccaaaccggcgccatcacgcggcaggttggcttcgccttcgagcacgcaggtgtcgaggcttgcgagcaggatgtcttccaccagcgcatcgatgcggcccaactcgcggtacatcaggcccagttcggtcaggcctggcagtttgccgcgcaggaatttcgccggttccgccagttgctgcatcagcaggcgttgcaaggcgcggcgatgctggaactcagcctcggcagccgtggagaaacgcccctccttgaccgtgccgttgtcttccaccagtgccggatataccgtcatcgacagcccggcgatcttttgttgcgtcttctcggccaccgccgcgaataccttggcctccaccggctgctggctttttgcggtttgcggcacagccaatgcggcctggctggcctcggcaaaacgcgccgtcagttcggcgagatcccggccttcaccaaggaacttgccctggccgtcgaccacttccaggttcatcttcaggtggctttccacctgctgcgcggcctcagcccaggcttcatcgctgacccgcgccccggtcatgcgcaacaattcgcggcccagggcctggggcaatgacccctggccgaactcgatgcgttgcagggcagccttgacgaagtccggcaccggtacaaaattcttgcgcagcgccttgggcaggttgcgcaccagggcgatgcacttggcttcgatcacccccggcaccaaccactccaggcgctccgccggcaaggcgggcaacagcggcgccggcacacgcagggtcacaccgtcacgcgggtggttgggttcgaagtggtaactcaaggccagttccaggtcacccaggtggagggtgtccgggtaatgcgcagcggtgacttcgctggcctcgcgggccagcacgtcttcttcgcgcatgatcaacagttgcgggtctttctggctgttgaccttgtaccagctgtcgaaggtcgcggtctggtggatctccgccggcaggcgcgcatcgtagaaggcgaacagggtttcctcgtccgccaggatgtcgcgccggcgcgccttggcttccaactcgtcgagctgttccagcagttgctggttggcggtgaggcacttggcccgcgactggatctcgccgcgtaccaggccttcacggataaacagctcgcgggacaccaccggatcgaccggcccgtagtgcaccggccggcgcccgaccacaatcagcccgaacagggtgatctgctcaaaggccacgacctggccgcgcttcttctcccaatggggctcgaagtggtttttcttgatcaggtgcccggccagcggttcgatccagtcggcgtcgatcttggcgaccatgcgcgcatacagcttggtggtttccaccagttcagcggtcatcagccattgcgggcgtttcttgccgatgcccgacgaggggtgaatccagaaacgccgctgacgtgcgcccaggtaatcgccgtcctcggttttctgaccgatctggctgagcaaaccggacagcaccgccttgtgcagtttcgggaagtccgccggctctttattgacgctcaactgcatgtcgcggcagatcaggctcaactggcgatgggaatcacgccattcgcgcaggcgcaggtagttgaggaagttcttgcggcaccagttacgcagtgggctggcagtcagttcctgacgttgctcttcaaaaccgcgccacaaattgaccaggccggcgaagtccgaatccgggtccttccactgtgcgtgggcctggtcggcggcctgctgacgctccggtgggcgctcgcgcgggtcctggatcgacatggcgctggcgacgatcagcacttcctgcaagctgcccagcttggcggcttcgagcaacatgcggcccatgcgcgggtccaccggcaggcgcgccagctggcggcccagcggggtgagctggctgttgcggtcgaccgccgacagctcttgcagcaggttgaaaccatcgctgatggctttgccgtccggcggttcgataaacgggaaatcggtgatttcgccgagacgcaaatgcagcatctgcaggatcacagcggcgaggttggtgcgcagaatttccgggtcggtaaattccgggcgtccgataaaatcttcttcgctgtacaaacgaatgcagatgcccggctcgacccgaccgcaacggcctttacgctggttggcgctggcctgggaaatcgcctcgatcggcaggcgctgcaccttggcgcggtagctgtagcggctgatgcgcgcagtgccgctgtcgatcacataacgaatgcccggcacggtcagcgaggtttccgcgacgttggtcgccagcaccacgcgccggcccggatgggactggaagatgcgctgctgttcggccggcgacaggcgcgcgtacaacggcaggatctcggtgtgcttgagctgggccttgcgcaacatgtcggcagcgtcacgaatctcgcgctcccccggcaggaacaccagcacgtcgccggggctgcgccgctcgctgcgctcataggcggcgatttcatcgagggcggcgaggatcgcctggtcgacggtgaggtcgtcctcgacgcggttgccttcctcgtcctgctccagggtcagcgggcggtaccaggtgtctaccgggaaggtacggcccgagacctcgactatcggcgcatcgtcgaaatgcttggagaagcgctccaagtcgatggtcgccgaggtgatgatgaccttgaggtccgggcgacgtggcagcagggttttcaggtagcccagcaggaagtcgatgttcaggctgcgttcgtgggcctcgtcgacgatgatggtgtcgtagcgctccaggtagcgatcgttctgggtttccgccagcaggatgccgtcggtcatcagcttgatcagggtgttggaatcgctctggtcttcaaagcgcacctgatagccgaccagcgcgcccaatggcgtggccaactcttcggcgacccggctggccacgctgcgtgcggcgatccggcggggctgggtatgaccaatcagaccgaactggccgcgaccgatttccaggcagatcttcggcaactgggtggtcttgcccgagccggtttcgccggcaatgatcagcacctgatgcttgttcagcgcctctttgatttcatcgcgcttggccgcgatcggcaggctgtcgtcataacgaatcaccggcaggctggcgcgccgcgccgtgacctgggcgcaggacgcctgcatgcgcgcgacccactgcgccagcttctcctcgtcgggcttcttgcgcagctcaagcagctggcgccgcaagcggtggcggtcggcgagcatggcgtgatcgagggttttgagcagttggtcgatagtgggcgcttggtcagtcatcaggtacgcaagggtcgtctatttatgcagggggcggattgtcgcagaaaaccgcccccaagcgtgccccctcattcgttatcgcggtccttacgccggtacgggaatacatcgatcaccttgcccgcccggatcgcctcctgcagccccttccaataatcggcgttgtacaactcgccgtgcagctcgtcgaagagcttgcgctggccggcatcggcgaacaggaacggtgggaattcttcggggaagacgtccaacgggccgatggaataccagggctcggaggccatttcatcctccggggtacgcggcgccgggatgtgccggaagttggcctcggtgagaaaacagatttcatcgtagtcgtagaacaccacgcggccatggcgggtgacgccgaagttcttcagcagcatatcgccgggaaaaatgttcgccgccgccagttgcttgatcgccaagccatagtcttccagggcctcgcgcacctgggcggggttggcgttgtcgaggtagaggttgagcggggtcatgcgccgttcggtccagcagtggcggatcagtacggtatcgccttcgacttcgacggtgcccgcagccacttccaatagctcggccaggcactcaggttcgaatttgctcagggggaaacggaagtcggcgaactcttgggtatcggccatgcgcccgacccggtcgacgcttttgaccaggcggtacttctcgatcaccgtggcgcggttgatgtttttcgacggtgaaaaacggtccttgatgatcttgaacacggtgttgaagcccggcagcgtgaacacgctcatgaccatgccgcgcacgccgggggccatgatgaattgatcgtcggtggtcgccaggtggttgatcagggcgcgatagaactccgacttgccgtgcttgtagaaaccgatggaggtgtacaactcggcgatgtgcttgccgggcaggatgcgtttgagaaagccgatgaattccgccggcaccggtacatcgaccatgaagtaggagcgggtgaacgagaagatgatcgatacatcggcttcgtcggtgatcagcgcatcgatctggataccttgcccttcgcggtgcagcaacgggatcaccagcggccattgttcgtcgcgggtgtagatgcgcccgacgaggtaggcacctttattacggtagagcaccgaggaaaacagctcgaccttgaggtccgggtccttgcacacccagtccggcaggttttcccgcagttgggtttcgaggcgttgaaggtcgcctgcgaggtcggcgtagggttcgctgaagcggtagtcggcaaagatctgcgcgagcatttccgggattttcgcggcgggggtgtaggtgcgcgtctgcgcggcccgtgcccgacgcaggctaggccgggtggtgtggatgaacatacagccgtcgctgatcaggtcgtggctgaacagcccgcagaagatcgagttgtaccaggtctcggagagttcatcgtcaaagcgccggtcgatcaggccgatgtaggcacttttgaccaagggccacgcatcgatgtcgagcagggcggcgtcatcgaagcgctcacgcaaccgctgggtcacctcagtgaccttttcctcatagagattgatccgcgccgccgacgccgcctggccctgctgccactgggccttttcgaaacgctcgcgggcgccatcggtgatctggcggaagtgttcgcggtaatcgtcgaagccatcaaggatcatctgggcaatggcgagggcggattgcgacatgcgggaaacctcgagcgggcatcgggaagccctgagcttagccagtgtacgaacacaggagaagggtcatttttcgtgcagccttgtacaactccgttcatttcgtacatttattttcaatttatttaattcgaccaattggtcaataaacgcactgaaaagtcgcacattgttttccccatacgcccacaacgacgcggctttgctgcttagcgccggaaacacgtgtactcccccggggactctgctccgcatacatctttggatccaactaagggaaaccctgattaccaccttgatggcactttgatatatagcgcgccctctcccaccctaacaaggtccgaagaccgatccgggaacaggttctaatcgcccaaggagcatagagatgtcattgaggaacatgaggatcggtctgcgtgccagtctgagttttggggttttggccagcttgctggtgattgtgggcctgttcggcctgggccagatggccaagctgcgacagagcgcgctggtcatcgaacaatcgtggatgccgagcatcgagaacatccacgacagcgcggcctttgtcgccagcatccgcctggaggccttgcgcctggcgaccaccgacgaatcgcggatccgcgacaacagcaaagccctgatcactcgccagcgcagcgagctgcaaaccctgctcgaccatcacaaaagcctgctcagcagcgacgaagaacgccagatgctcaagcaactcgaagggaacgtgaacacttacctggccctcgtcgaacagatcgtcaccctggtggacaaggatcagcagcaagacgccattgacctgctcaacagccggctcgctccgcagggtgtgatcctcaacaagagcctggaggacatgatcgtgttcaaccagaacggcgtggaaacggcggtggattcagccgcacagacctattccagtgcacagtggatcgtcggcctgatcatcgtattcgccttgatcgccaccttgttgctcgcctggctgctgacccgcagcatcaccgccccgctcggccaggcgctgagcgtggcccgcaccattgccggcggcgacctgagccagccgattgccgtcagcggcaaggacgaaccggcccaattgctcaacgccctggcgaccatgcaggcgcagttgcagggcaccattcgcggcatcagcgaatcggcgcaacagctggcctccgccgccgaagagatgagctcagtgatggagcaaagcacccgtggcctgcaggcgcagaacgacgaaatcgaacaggccgccaccgcagtcaccgaaatgagcgcggccgtggacgaagtggcgggcaatgcggtgtccagcgccgaggcgtcccaggcctccgacgaggacagcaagcacggccactaccagatcagcgaaaccatcagctcgatccagaacctggtcgacgaagtgcttggcgcctcgaacaaggccgaaggcctggcagtgcaggcccaggacatcagcaaggtgctggaagtgatccgcggcatcgccgggcagaccaacctgctggcgctcaacgccgccatcgaagcggcccgcgcaggcgaggccgggcgggggtttgcggtggtggccgatgaagtgcgctccctggcgcaacgcacccaggactccaccgaagaaatcgagcagatgatcaccggcatccagcgcggcacccaggatacggtcgacgcgctgaacagcagcgccgagcacgcgggccagaccctgcagcgggccaacagcgccggcagtgccctggaaaaaatcaccgcggccatctcgcagatcagccagcgcaacctggtgatcgccagcgccgccgagcagcaggcgctggtggcacgcgacgtggaccgcagcctggtgaacatccgcgacctgtccacccagaccgccgccggtgccacccagacctcggccgccagccaggaactgtcgcgcctggcggtggacctgaatgcgctggtgacgcggtttgtcctgtaatcattagacatgtcatgcaacactcgcggccttattgaggtaggagtgttccgtgagacctgtcgacaccttgtacttgctgggactcgccgccatctggggcgcgagcttcctgttcatgcgcattatcgcgccggagatcggcacgctgccgaccgcatttttccgcgtgtcgatcgccgccgccgggttgctggtgatcctggcggtgatgcgggtgagctgggacttccaaggcaagttcaagactgtattgctgctcggcgtgatcaactccgggatcccggcgaccatgtattcagtcgccgcccaggtgctgccggcgggttactcggcgatcttcaacgccaccacgccgttgatgggtgtgctgatcggcgggctgtttttcagcgaacgtctgaccccgtcgaaagtcgccggggtgtgcctgggcctgctgggcgtgggggtactgacccgcgccgggccggtggcgtttgacctgcaattgctgatgggcgcgctggcgtgtttgctggcgaccacctgttacggctttgccgggttcctggcaaggcgctggctggatcagcgtggtggcttggacagccgcctgtcggccctgggcagcatgctcggcgcgacgttgttcctgttgccgttctttgcctacagcgccatcagccaaccgccggcgagttggggtggatggcaggtgtgggggtcgttgctggggttggggctggtgtgtacggcgtttgcctacattctttacttccggttgctgacgtccatcgggccggttaagtcgatgacggtgacgttcatgattccgccgtttggggtgttgtggggggcgttgttgctgggggagccgttgtcgatggcgcacctgtatggcggggtgttgattgcgggggcgttgtggttggtgttgcggccgcgaaaattgtaggagcccggcttgccggctcctacagtgcggtgtcaacgcttacggaagacaaacaccaaaccgatgatgatcaaccccatccccaacaggctcaacatcgcgagcttgttgccgaagatcagatagtccatcaccgccgtcaccgccggcaccagatagaacagactggtgacattcaccaggttgccccgggcgatcaggcggtacagcaacagcgtggccagcaacgacaccaccaagcccatccacagtaccggcaggtagaagctgccgctgtgttcaaaatgaaacggctggaacggcacaaacaccgaacacagcagcaaccccgccaggtattggaccggcaacgtgcccaaggggttgtcggtgatgcgtttctgcatgatcgagccgaaggtcatgctggccagggccaacaacccaaacagcatccccgccaaagacatgccggacaaaccgatgccctggtagaccaccatgatcagccccgccaaccccagcgccaggccaaacaaccgactcaacgaacgctgacgttccatcaacaccacggtaaggatcggctgcacgcccatgatggtcgccatcatgccgggggtgactttcaggtccagggccagcagatagaaaatctggtatgcccccagcagtaccaacccggttgccgccgcgtacagcatgggcttgccggggcgcggcagtttcaacttgaggatcggtatcagcaccaccaggcccacgagggcgatggcaaaacggattaacagaaacgcaaagggtgacgcgtgggccagcccccatttggagaagatcgccccgctgctccacagcaatacaaacaggctcgtcgaggccgccgcggccacggattgtttcgaaagaacagacatggttaccacctgtcatcaggcaaaaaaagccgattcagcagacgctgaaatgcattaggtttttttcaggcgggcagacgggaacagcaatcagctgatcagcccaaaatgccaacacccggcggtgatacgactgcgtacaccggcgtgctactgacaggtggggggtagtgactgatctgcgcaggctgcttgttcgcgcacggcacgaccacagcgttgaccgctgaatcgactaccgctgtgcgctggagagctggcatgggctgatcttgtgtgaagggatgaagaagctcggactataaccacccggtgatacgttttgcaatcggcatgaatggaggagttttcatgtggggcctgcaggaccggtcgctataatgccgcccagcattttccaaggagttcccatgttcgcattgccctggctgtacctggcgcttctttccatcggctatctgctggcgttgatatacgggcaactgggggtgttggcagccgtgtccgtcgccctgctgctgatcgctggctacgcggtacgccagcaacgcacgcactgggcgcgttacctgggccacgggctgttcatcgtgttggcgctgagcctggcgatgcactggttgccgggcttctacaacgggaggggcattgcctcgcaccgcttcaccgaggatgccgtgcccttctcgatgtatttgaaccaggacaaacctctgatcggcttctggctgttgctggcctgcccatggattgtggcacggcgctcgttgcgcttgtcgatctgcgtggccgccctggcattgaccctcaccgccatctccgccctcggcggagcggccttgctgggcgtgatcagttgggcaccgaagtggccggaacaagcctggctgtgggtactcaataacctgttgctggtgacgctggtggaagaagccttgttccgcggttatgtgcagggcggcttgagccgacgtttcaaacacctgccttacggcgagaacctggcgctgctgctggcctcgctgctgttcggcctggtgcacatcggcgcaggctggcattgggtattgctggcgagcatcgccggggtgggttacggcctggcctatcgttttggcggcctgggcgcggcggtggccacgcactttggcttgaatctgcttcacttcgggttgtttacctacccgatgctggccggttgatcccctgcaggggaacgtgcgtaccgccgattgttgcaaaaattaagttaaataaaccgccgttcctgccgataccccctgaaagccttgcggattgaacaatcatgcgtaataaccaacccgttacccagcgcgaacgtaccttccccgctcagcaacggttgatctccaccacagatgccaaaggcgtgatcacctactgcaacgacgccttcgtcgaaatcagtgggttctctcgcgacgaactggtgcgtgccccgcacaacctggtgcgtcacccggacgttccggcggcggtgttcgcgcacatgtggtcaacgctcaaacaaggcttgccatggatgggcattgtcaagaatcgctgcaagaccggtgaccattactgggttaacgcctatgtgacgccggttttcgaaggcaaccaggtggtcggctacgaatcggtgcgcatcaagcccaccgccgagcagatccgccgggccgaagcgctctaccaacgcatcaaccagggcaagtcggcgatcccccagcgggacaagtggctaccggtgttgcaggactggctaccgtttatcctggtgagccagttgagtttcatgatcggcgcgtccctcaactcccactggggctttgccctggcggcggggttgtcggtgccgttgggcctgctcggcctgagctggcaacagcgcggcctcaagcgtttgctgcgcctggccgagcagaccacctccgacccgctgatcgcgcagatgtacaccgacagccgtggcgcccaggcgcgtctggagatgtctatcctcagtcaggaggcacgtctgaagacgtgtcttacccgcctgcaggacactgccgagcacctcaacgaccaggccgcgcagtccaacaccctggcgcataacagctccagcggcctggaacgccagcgcgtcgagactgagcaggtggcgaccgccgttaaccagatggcggccaccacccaggaagtcgccagccatgtgcagcgcacagcggacgcaacccaggaagccaaccgcctcaccggccgtggccgcgacatcgccggggaaacccgcgaggcgattcagcgtctgtccgtagcagtgggtgagaccggtgtgaccgttacccagttggccaaggacagcgatgaaatcggcggcgtggtcgacgtgatcaagggcattgccgaccagaccaacctgctggcgctcaacgccgccattgaagcggcgcgtgccggtgaaatgggccggggttttgcggtggttgccgacgaagtccgccaattggctcagcgcacagccgagtcgaccgggcagatccatgccctgatcgccaagctgcaacaaaccgccgccgctgccgtacagaccatggacgccgggcatcgccaggccgaagaaggcgtggcacgggtgatggaggcggatcaggcgctggtagggatcagtgaggcggtggcgcatatcaccgacatgactacccagatcgcggctgccaccgaagagcaaagctcggtggccgaagagatcagtcgcaacatcagcaccattgcgctgttggcggaccagacctcggagcaagcgtcgaactcggcgcagttgagtgaagaattgacgcatacggcgaatacccagtattcgttggtggagcgcttcaaccgatagaccgttatcggggcggtgcgacgattcgacaacccccctcccacactttgactgtattcacaaatcaaaatgtgggagggggcttgcccccgatagggccctagaggacgccgagaaacctggccaccttcaccgccgccgcctccaaatgctgctcatgactaaaccccgacgccttcaacggcttcaagtcatgatcccccgccaccagccacatcacctcgatgctcggcgacaattcatacccctcaaccgccgcccgattacccagcgcatcgcgctcgccctgcacaatcaaggttggcgtcttcaaccccgccaaatgctcaacccgtggtttctccggcttgcccaccgcgtagaacggataccccaggcacaccagcccatcggcgcccagttgatcggccaacaaactggccatgcgcccgcccatggacttgccaccaatggccagtttcccagcgacatgacgtcgcacctcggcatgcaccccgcgccaggcttccagcagtttcggcgcagggtttggcgggcgcttgccgccatccacccggcgctgggccatgtagggaaactcaaagcgcaacacgttgacgccatgcccggcaaggcctgcagccatatcgttcatgaaggatgagtccatcggtgcgccagcgccgtgggccaggatcagcgtgacgggatcgctcgaaagcgcctccaccgcgacatcccacaaccacccatgttcccgcacacactgcgcccattgatccccgtcaatactggccttgtgctctttgcccatgcttgcctcgctttttagtctgcctataactccagcccaagtgccgcatttgcttgggttgaaccgtggatggggaaccatgaacactactttaagtaccgcctataactacaaggtggtccgccaattcaccattatgacggtggtgtggggcatcgtcggcatggggctcggggtttttctcgcggcccaattggtgtggcctgcactcaacttcgacttgccgtggaccagcttcggccgcctgcgcccgctgcacaccaacgcggtgatcttcgccttcggtggctgcgcgctgttcgccagctccttctactcggtgcagcgtacctgccagacccaattgttcgcgccgaaaatcgccgcgttctgcttctggggctggcagttggtcatcctgctggcagcgatctccttgccgctgggctacaccagctccaaggaatacgccgagctggaatggccgatcgatattctgatcaccattgtctgggtggcctacgccattgtgttctttggcaccgtggccaagcgcaacaccaagcacatctacgtcggtaactggttcttcggtgcgttcatcatcaccgtggccatcctgcatatcgtcaacaacctggaaatcccggtcagcctgaccaagtcctactccctctatggcggtgcgacggatgccatggtgcagtggtggtacgggcacaacgcggtaggctttttcctcaccgccggtttcctcggcatgatgtattacttcgtgcccaagcaggccgagcgtccggtgtattcctatcgcttgtccatcgtgcacttctgggcgctgatcaccctgtacatctgggcaggcccgcaccacttgcactacaccgcactgccggactgggcacagtccctgggcatggtgatgtcgctggtgctgctggcaccgagctggggcggcatgatcaacggcatgatgaccctgtcgggcgcctggcataagttgcgcagcgacccgatcctgcgcttcctggtggtgtccctggcgttctacggcatgtcgaccttcgaaggcccgatgatggcgatcaagaccgtcaacgccctctcccactacaccgactggaccatcggccacgtacacgccggcgcactcggttgggtggcgatgatctccatcggcgcgctgtaccacatgatcccgaaagtctttggccgcgagcagatgtacagcctcggcctgatcaacgcgcacttctggctggccaccatcggcaccgtactctacatcgcttcgatgtgggtcaacggcatcgcccagggcctgatgtggcgtgcggtcaacgaagacggcaccttgacctactccttcgtcgaaaccctggtggccagccaccctggcttcatcgtgcggctggtgggcggtgcgatcttcctcagcggcatgttcctgatggcttacaacacctggcgcaccgtgcgttcggcgcagcctgtcgaagccgccaccactgcgcagttggcctgaggagtctgtgatgaaacacgaaacgattgaaaagaacgtcggcctgctgatgctgctcatggtgctcgccgtgagcatcggcggcctgacccagatcgtcccgctgttcttccaggacgtgaccaacaagccggtggagggcatgaaaccctacaccgcgctgcaactggaaggccgcgacatctacatccgcgaaggctgcgtacagtgccactcgcagatgatccgcccgttccgtgccgaaaccgaacgctacggccactactcggtcgccggtgaaagcgtgtgggaccacccgttcctgtggggctccaagcgcaccggtccggacctggcgcgcgtcggcgcacgctactcggacgactggcaccgcgcgcacctgtacaacccgcgcaacgtggtgcccgagtcgaaaatgccggcctatccatggttggtcaccgccgccgtcgacagcagccacaccgagaccaagttgaaagtgatgcgcaccctcggcgtgccgtacaccgacgacgacatcagtggcgccgtggccagcctcaagggcaagaccgagatggacgcgctggtttcgtacctgcaagtgctcggcactgccatcaagagcaagaggtgagccatgggatttgaattcgatgcaggcaccatccgcggcctcggcacgctggtggtcgccatcgcctttatcggcctgtcgctgtgggtgttcaacaaccggcgcaatgcggaattcgagcaggcgcgcctgctgcccttcgccgatgaaccttctccatccgacgctcaagaagagcctgcaataaggagcacccggccatgaccctattctggagtacatggatctgcgtactgaccctcggcagcctgatcggcttgacctggctgctggtcggcacccgcaagggcgagaccaagggcagcgtcgaccagaccatgggccacgccttcgacggtatcgaggaatacgacaacccgctgccccagtggtggttcatgctgttcgccggcaccctggtgtttgcggtcggctacctgatcctctacccgggcctgggcaactggaaaggcgtgttgccgggctatgaagacggctggacccaggccaaggaatgggacaaggaaatggccaaggccgacgccaagttcgggccgatcttcgccaaattctcggccatgcccgtggaagaagtcgccaaagacccgcaagcgctgaaaatgggcggtcgcctgtttgcctccaactgtgcggtgtgccacggctcggacgccaagggcgcgtttggtttcccgaacctggcggacaacatctggcgctggggcggttcggccgaggcgatcaagaccaccatcctcaacggccgccacgcggcgatgccggcctggggtgacatgctcggcgatgaaggtgtgaaaaacgttgccgcctatgtgcgccacgacctggccaagctgcctctgcccgccgacagcagcgccgatgtggctgccggccaagcggccttcaacaccacctgtgtcgcctgccacggtccggaaggccatggcatggaagccatgggcgcgcctgacctgaccaaaccggccggctacatctacggcaccagccttgcgcagttgcaacagaccatccgccacggccgccaaggccagatgccggcgcaggaagtgctgcaaggcaatgacaaggtgcatctgctggcggcctatgtttacagcctgtcccacaacgctgatggcgcaacgccagaaagccaagcgcaataaccgctgatcgccgccccattttggggcggcaaccctggtgctgtacgcgaccaagtgtcacacccttccaaagcacaactttcccctcctcactttcgggtctacgcttgttcccacagcggaccaatcctggcgtacgcgacgacattcgttgcgacccctgaattttcctgtccactcgatcagctttcgatttccgattttgtccttacaccaaacatggaaagggcgcagaatctggcgtggaacgcattgatacaggtcagtcattgcgttgcaatgacccctcgctttctacatacttgcggccgattttacctataaaaaaacctaaaccgtggaaccttagaatgagcacagcaatcagtccgactgcttataactataaggtagtccgccagttcgccatcatgacggtggtctgggggatccttggcatggggctcggggtgttcatcgcctcgcaactggtctggccggaattgaatttcggtttgccatggacgacctttggccgcctgcgcccgctgcacaccaacctggtgatcttcgccttcggcggatgtgcattgtttgccacctcctactatgtcgtgcagcgaacctgccagacgcgactgatctccgacagccttgcggccttcaccttctggggttggcaagcggtcatcgtcggcgccatcgtcaccctgccgctgggctacaccaccaccaaggaatacgccgagctggaatggcccattgccattttgctcgccatcgtgtgggtgacctatgccgtggtgttcttcggcaccatcgtcaagcgcaagaccaagcatatctacgtgggtaactggttctacggcgcgttcatcctggtgacagcgatgctgcacatcgtcaaccacgcctcgttgccggtgagcctgttcaagtcctactcggcctacgccggggccaccgatgcgatgatccagtggtggtacggccacaacgccgtgggtttcttcctgaccaccggtttcctggggatgatgtactacttcgtgccgaaacaggccgaacgtcctatttactcgtatcgcctgtccatcgtgcacttctgggcgctgatcaccctgtacatctgggcaggtccccaccacttgcactacaccgcattgccggactgggcccagtccctgggcatggcgatgtcgatcatcctgctggccccgagctggggcggcatgatcaacggcatgatgaccctgtcgggcgcctggcataaattgcgcaccgacccgatcctgcgcttcctcgtggtgtcgctggcgttctacggcatgtcgaccttcgaagggccgatgatggcgatcaagaccgtcaactcgctgtcccactacaccgactggaccatcggccacgtacacgccggcgccctcggctgggtggcgatgatctccatcggcgcgctgtaccacatgatccccaaactgttcggtcgcccgcaaatgcacagcgtcggcctgatcaatgcgcacttctggctggccaccatcggcaccgtgctctacatcgcctcgatgtgggtcaacggcatcacccagggcctgatgtggcgtgcgatcaacgatgacggcaccctcacctactccttcgtcgaagcactgcaagccagccatccgggttacatcgtgcgcgccctgggcggtgcattctttgcctccggcatgttcctgatggcctacaacgtctggcgcaccgtgcgtgccgccgaccctgtagaagccgaagccgccgccaagatcgccgttgtgggagctcactgatgaagcatgaagtagtcgagaagaatatcggcctgctggccttcttcatggtcatcgccgtgagcatcggcggcctgacccagatcgttccgctgtttttccaggacgtgaccaacaagccggtggaaggcatgaagccgcgcaccgcccttgaactggaaggccgcgacgtctacatcgccaacggttgtgtcggctgccactcgcagatgattcgcccgttccgtgctgaaaccgaacgctacggccactactcggtcgccggcgaaagcgtatgggaccacccgttcctgtggggttccaagcgcaccggcccggacctggcccgtgtcggcgggcgttactccgatgactggcagcgtgcgcacttgtacaacccgcgcaacgtggtgcctgagtcgaaaatgccggcgtacccgttcctcgtggaaaacaagctcgacggcaaggacaccgcgaagaagatggaagtcctgcgcaccctgggcgtgccctataccgacgaagacatcgccggtgcagccgccgccgtgaagggcaagaccgaaatggacgcactggtggcctacctacaaggcctgggcaccatcatcaaaagcaaacggtgatctatggatatcgggatgattcgtggcctgggcaccgttgtggtgatggtggcctttatcggcctggcgttgtgggtgttcagccccaagcgcaagtcggagtttgaagacgcgaccttgctgccctttgcggatgatcccgaagccatcaagcacgtcgagcaagcttctaggagtaacaaagaatgactacgttctggagtctgtacgtcacagtcctcagtctgggtaccatcttcgccctgacctggctgctgctgtcgacccgcaagggccagcgcgccgagcaaaccgacgaaaccgtcggccactcgttcgacggcatcgaggagtacgacaacccgctgcccaagtggtggttcatgctgttcgtcggcaccatcgtcttcgccctcggctacctggcgctgtaccccggcctgggcaactggaagggcctgctgccgggctacaactacctcgacaccgacaagcaaacccccttcgccaacggccagaccggctggaccggcgtgcacgaatgggaaaaggaaatggccaggtcggacgccaagttcgggccgatcttcgccaaattcgcgtcgatgccgattgaagaagtggccaaggacccgcaagccctgaagatgggtggccgcctgttcgcctccaactgctcggtgtgccacggttccgacgccaagggcgcctatggcttccccaacctgaccgacgcagactggcgctggggcggcgagccggccaccatcaaggaaaccatcatgaagggtcgccatgcggtgatgccggcgtggttggatatcctcaaggaacaaggcgtcagcgatgtggccgcgttcgtgctcaccaacctcgacgggcgcaaactgcccgaaggcgtgaaagccgatgtggccaacggcgagaaactcttcgccgccaactgcgtggcctgccacggcccggccggtaaaggcaccgccgccatgggcgcgcccgacctgactcacccgggtgcattcatctacggctcgagcttcgcccagctgcagcagaccatccgttggggccgccagggccagatgcctgcgcaggagcaactgcaaggcaatgacaaggtgcacttgctggcggcgtatgtgtacagcttgtcccatggagataagaaggctgaagagcagtaactcctcgaaagaacaaagccccgtgcagcgtaagctggcggggctttgttctttctggctcccagggttatccaagcaggaacccactaccacttgatacttgcggctcggagcaaccaagtagtaacgtaactacattcagcctgacaaaggggggagcaccccatgaccatcacgactatttccagccgcgaattcaaccaagacacaagtggcgccaaaaaagccgcccgccaggggccggtttttatcaccgatcgcggcaagcccgcccatgtactgctaagcattgaggagtaccagaaactgacagggctcaaggccgacatcgttgatctgctagtgatgccggaagcggccgatatcgacttcgaaaccgagcgagccgtgatcactcatcgacctgtggacctctcttgatgtatctactcgacaccaacgttatttctgaactgcgcaaaccccaggctgatgcaaaagtggtcgcctgggccaaaagtgtcatcgctacacgcatgtttatttccgcgatcacattgaaagaattggagaccggggtgttacgtattgagcgccgagacccggcacaaggaaagctgctaagaacctggctcaagcgccatgtaatgcccgcttttgattccaggatcctgccggtggataccgcggtcgcgctgcgttgtgcccatctgcatgtgcctgaccgggcaaatgaaagcgatgcgctgatcgccgctaccgctctggtccacgggctcaccgtggtcacacgcaatatcaatgacttcaaatccagcggggttccgttgatcaatccatgggacgaatgaccacaatacctaccaaaaccgtccatacttcccaagtcaattgatccagatcacgtacaccatcaattgatttcccccaacgcgaccaaaggtcgcaccctttgcacatcctcgggggcgtatcattaggccactgcaacaccctacatttgaccccggttggcacgtactggccgaggcaaatctccaccgccgtgggatgcaatgatgagcaaccagataccggtacatgacgttaccccgcctgccaaaaccgtcgacctctacgcctcgcgagagaaaatctacacgcgcgccttcaccggcctgttccgcaatctacgcatgctcggcggtgccggcctgttcctgctctacttcggcacggtgtggctgaactggggtggccaccaggccgtgtggtggaacctgcctgagcgtaagttctttatttttggcgcaaccttctggccccaggacttcatcctgctctcgggcatcctgatcgtcgcagcgtttggcctgttctttatcacggtgtacgccggtcgcgtgtggtgcggctacacctgcccgcaaagcgtgtggacgtggatcttcatgtggtgcgaaaaggtcaccgaaggcgaccgcaaccaacgcatcaagctcgacaaggcaccgatgggcgccaacaaattcctgcgcaaattcagcaagcacacgctgtggctgctgatcggatttgtcaccggcatgacctttgtcggctacttctcgccgatccgcgaactggtgttcgacttcttcaccggccaggccgatggctggtcgtatttctgggtcggtttcttcaccctcgccacctacggcaacgccggctggctgcgcgaacaggtgtgcatctacatgtgcccgtatgcgcgcttccagagcgtgatgttcgacaaggacaccctgatcgtttcctacgacccacgccgtggcgagctacgcggcccgcgtaaaaaaggcaccgactacaaggcccagggcctgggcgattgcatcgattgcacgatgtgcgtgcaagtgtgcccgaccggtatcgacatccgcgacggcctgcagatcgagtgcatcggctgcgccgcctgcatcgacgcctgtgacaacatcatggacaaaatggactacccgcgcggcctgatcagctacaccaccgagcacaacctgtcggggcagaaaacccacaagctgcgcccgcgcctgatcggctacgccctggtactgctggcgatgatcagcctgctggtggcggcgttcttcatgcgctcgctggtgggtttcgacgtgagcaaggaccgcgtgctgtaccgcgaaaacgccgaaggccgcatcgagaacgtctacagcctgaagatcatgaacaaggaccagcgcgaccacacctacgtgctcgacgccgccggcctgcccgacctcaagctgcaaggccggcgcgagatcaaggtggcggccggcgatatcgtcagcatgccggtggagctgtcgagtgcgccggaacagttgccgtcgagcaccaacgaggtgaaattcatcctcaccgatgccgatgacgccagcgtccatattgaagccaagagccgattcatcggcccacaagtccgctaacagggaaccgaacaatgtccgtagcaactgccgcaagcccttggtacaagcacctctggccctggatcatcattggcatcctggcctgttcggtgaccttgaccctgtcaatggtgaccatcgcggtgaacaacccggacaacctggtcaacgacaactactacgaggccggcaaaggcatcaaccgctccctcgaccgcgagctgctcgcgcagaccctgcaactgcgcgccaaggtgcacctggatgagctgaccggtgaagtcgaggtcaaccttaccggctacagcaacccgaaaaccctggagctgaacctgatttccccgacccagccggagaaggaccgcaagatcaacctggcccgcagtgacagcgagcccggacgctatatcggccaggtcaccgacaaggtcgaaggccggcgtttcgtcgagttgctcggcgtggaaggcgaccggacctggcgcatgttcgaggaagaacaagtcagccacgacaaggacttgctgctgggtgatgaaccgttgcagggtgccgaagacctgaaaaaataaaaagcctgcgcttcgcgcatcgggggcaagccccctcccacactggattgggtttacacatatctattggtgaaatcagtcaaatgtgggagggggcttgcccccgatgaggccctaccagccaccatagattcccaagccatgaccaccccctgctaccactgcgccctccccgtcccctccggtagccgtttcaccacggtcatcctcggtgagcgccgcgaactctgctgtcccggctgccaggccgtggccgaagccatcgtggccggtggcctggaaagttattaccaacaccgcagcgaagcctcggccaaccccgaggcgttgccggtacaactggtggatgagctggcgctgtatgaccgcgccgacgtgcagaaaccttttgtgcgccacgaaggcgaactcgccgaagtcaccctattgatggaaggcatcagttgcgccgcctgcggctggctgatcgagaaacacctgcgcagcctgcccgccgtggccgaggcgcggttgaacctgtccaaccaccgcctgcacgtgcgttgggccgatgggcaactgccgctgagccaactgctcggtgaactgcgccatatcggctacgccgctcacccctatcaggcggatcgcgccgccgagcaactggccggcgaaaaccgcctggccctgcgccaactgggcgtggccgggctgctgtggttccaggcgatgatggcaaccatggccacctggccggaattcaacatcgacctgagccccgagctgcatgtgatcctgcgctgggtggcgatgtttcttacaacacccatcgtgttctacagctgtacaccgtttttcaagggcgccttgcgcgacttgcgcacgcgccacctgaccatggatgtctcagtatccctggccatcggcggggcttacctggcgggcatctggaccgccatcaccggcacgggcgagttgtacttcgatgcggtgggcatgtttgcgttgttcctgctggccggtcgctacctggagcgccgcgccagggagcgcacggccgccgcgacggcgcaactggtgaacctgctgcccgcctcgtgcctgcgactcaagcccgacggccagagcgagcgcatcctgctccccgaacttaccctgggcgaccgcgtgctggtgcaccccggtgccgtgctgccggcggatggcgtgattctcgatggacaatcgagcattgatgaatccctgctcaccggtgagtacctgccgcaaccgcgccagaccggcgacgcggtcacggcgggtacgctgaatgtcgagggggcattgaccgtcgaagtacgtgccctgggccatgacacgcggctgtccgccatcgtgcgtttgcttgagcgcgcccaggccgataaaccacgcctggcgcaaatcgccgaccgggccgcgcagtggttcctgttgtgctcgctgatcgccgccgcgctgatcggcctgctgtggtgggagctggacgcgtcgcgggcgttctggattgtgctggcaatgctggtggcaacttgcccctgtgcgctgtctctggccactcccaccgccctcaccgccgccaccggtactttgcacaaactcgggttactgctaactcgcggccatgtgctggaagggctgaaccagatcgacacggtgatcttcgacaagaccggcactctcaccgaagggcgcctggcattgagagccatccggcccttggggtcgttgagcaccgacctgtgcctgagcttggccgccgccctggaaaaccgctccgaacacccgattgcacgcgccttcgggcgtgcgccattggccgccgatgaagtcatcagttcgccagggctgggccttgaaggtcgtgtcggcgagcgcgtattgcgcattggccagccgggctttgtctgcgaactcagtggttgcccgattcctgcagcaccggaggtttgcggccaatggctgttgctcggcgaccgcgacggcgccctggcctggttcgtgctcgacgaccgcctgcgcagtgatgcccctgccctgctggccgcgtgcaaggcgcgtggttggcgcacgctgttgctgtccggggacagttcgccgatggtcgccagcgtcgccgccgagctgggtatcgacgaggcccacggcggcctgcgcccggatgacaagctgcaagtccttcagcaactgcacaaggaaggtcgcaaggtgctgatgcttggcgatggcgtcaacgatgtgccggtactcgccgccgcggacatcagcgtggcgatgggcacggccaccgacctggccaagaccagcgccgatgcggtgttgctgtccaaccgcctggacgccttggtgcaagcctttactctggcgcggcgcacccgccgggtaatcattgaaaacctgctgtgggccgggctgtacaatggccttatgctgccgtttgccgccctgggctggatcactcccatctgggcggcgatcggcatgtccctcagctcgttgaccgtggtgctcaatgctctgcgcctgactcgcctgccgagcgcgccggccgtccgagccccctcaataacccgcccgctgccggtgtgagccgcgcgggcatggagtgcagatgccagctttatacgtgatgatcccggcggcgctgctcttggtgggcgtggccatctacatcttcttctgggccgtggacagcggccagtacgacgacctcgacggcccggcccatagcgtgctgttcgacgaccaggacccgaaccacctggccggcgtcgaagaggccaaccaccccgaacaaccaccaaaagacccgccccatgcttgagctggcgccgctgctggtctctgcgctgatcctcggcctgctcggtggcggccattgcctgggcatgtgcggcgggctgatgggcgcgctgaccctggcgatccccaaagagcaacgcggccgcaggtttcaactgctgctggcctacaacctggggcgcatcctcagctatgccgcggccggcgtgttgatcggccttgccggctgggcggtggcgaacagcccggcggcgatgttcatgcgcgtgctcgccggcctattgttgatcagcatgggcctgtacctggcgggctggtggagcggcctcacccgtatagaaagcctcggacgcggcctgtggcgctatatacagccggtcgccaaccgtttgctgcccgtgtccagcgtaccgcgtgcattgctgctgggcgcgctgtggggctggttgccgtgcggattggtctacagcacgttgctgtgggcggcgagccagggcaatgcctgggacagtgggttgttgatgctggcgttcgggctggggacttggccggtgctgttggctacaggtctggcggctgagcgggtaacggcgctgttgcgcaagcgcagcgtgaggatggccggcggcttgctggtgatcctgtttggaatatggacgttacccggtccgcaccagcactggttgatgggccattagatcgccatgtggcatagcgccgctccctgttgatgcaaatcaaggtggtcgccccggccagcccctagactcggcccactagcctatccgggggaacgcccgcatgctcgacgccattcgttgggataccgatctgattcaccgctacgacctggcgggaccgcgctacacgtcctaccccaccgccgtacaattcgacagccaggtcggcaccttcgacctgctccacgccctgcgcgacagccgcaaggcggtgcggccgctgtcgctgtatgtgcatgtgccgttctgcgcgaacatctgctactactgcgcctgcaacaaggtcatcaccaaggaccgtggccgcgcccaggcctacctgcaacgcctggagcaagagattcaactggtggcgtgccaccttgaccccaagcaaccggtggaacagctgcacttcggcggcggcaccccgacctttctcagccacgacgaattgcgccaggtgatgagctgcctgcgccagcacttcaatttgctggatgacgattccggcgactacggcatcgagatcgacccacgcgaagcggattgggccaccatgggcctgctgcgcgagctgggtttcaaccgcgtgagtatcggcctgcaagacctcgaccccgaggtgcaacgggcagtcaaccgcctgcaaagcctggaagaaacccgcgcggtgatcgatgcggcacgcaccctgcaatttcgttcgatcaatgtcgacctgatctacggcctgcccaagcaaacgccgatcaacttcgcacgcaccgtggaagaggtaatcaggctacagcccgaccgcttgtcggtgttcaactacgcccatctgccggaacgcttcatgccccagcggcgcatcaacaccgatgaactgccgtccccggcctcaaagctgctgatgctgcaaaccaccatcgagcaactgacccaggccggctaccgctacatcggcatggaccacttcgccctgcccgacgacgaactggccatcgcccaggaagaaggcaccctgcagcgcaatttccagggctataccacccacggtcattgcgacttgatcgggcttggtgtgtcggcgatcagtcagattggcgacctgtactgccagaacagcagcgacctcaacggctatcagaacacgctggcgggcgcgcaactggccaccagtcgcggcctggtgtgtaccaccgatgatcggttgcggcgggaagtgatccagcagttgatctgcaatttcagcctggacttcgagaagatcgagcaggcgttcaccattgattttcgcggatattttgccgagatctggccgcaactggaggccatggccgaggatggcctgatcaaactcgacgcccaaggcattcgcgttttgccagccgggcgcctgctggtgcgttcggtgtgcatggtgttcgatgcctacctggagcaccagaacaggcagcggttttcgcgggtgatctgaaacaccctacgccatagcgagggagccggccttcaacgcgtcttccccgctgaggcctttcatggccttggccagggaggtttgtgcagtcaccaggctcgcctgcaactgggcgagtgccccttgcagattgctgaccttgatccgcgcctcgtcggggctgaggctcttgtccgccatcacggcttgcagttcggcctgtttctcggcgatctgctccttgatcttgcgaatcatcttgaggacctgctggacactgtccggcagaccgctgtcttcgatgtccttattgggtttcttggcctccgtcagggctttcaaggcagcaccggaaaaggtcaccttcaccccctcctcgtcctttttctcccgcaacggcgcttcagtagcgtccttgagctctttggcagccttggcgagcttggcctctgccaccaggtctttcggctccgcaaaggactgcacctgagcgcctgccgagttcattgcaccgatggaaatcatgaatagagcctccaggctcaagggttcgtgactttgtatcggcggcgacacaaaattctttataccgttgctggttttttgtacacgctggcctcaccggcccccagtgcgttacccttacgtcttatgtgtgttttcccacaaggatttaagaaatgtccgagccagtcaaactgcgcgctcacagccaggctcattgcaaggattgcagcctggcccccctctgcttgccactttcgttgaatctggaagacatggatgcgctggacgagatcgttaaacgtggtcgcccgctgaaaaaaggcgagttcctgttccgccagggcgacaagttcgattccgtttatgcagtacgttcgggtgcattgaagacgttcagcctgagcgacagcggcgaagagcagatcaccggtttccacctgcccagcgaactggtgggcttgtcgggcatggacaccgaaattcacccggtgtcggcccaggcactggagactacatccgtgtgcgaaatccccttcgaacgcctggacgaactggccctgcaattgccgcaactgcgccgccagttgatgcgcgtgatgagtcgcgaaattcgtgacgaccagcaaatgatgctgctgttgtcgaagaaaaccgccgacgaacgcatcgcgactttcctggtcaacctgtcggcgcggttccgtgcccgggggttctcggccaaccagttccgcctgagcatgtcgcgcaacgaaatcggcaactacctgggcctggcggtggaaaccgtgtcccgcgtatttacccgtttccagcagaacgagctgatcgccgccgaaggcaaggaagtgcatatcctcgacccgatccagttgtgcgcgctggccggtggttccctggaaggttgacgcagacacttgcggccgcgccaaccggcgaggccgcaggtatacttcgagtccgtttccagccccaggactcttcgacgatgaccttcgattcgttcgacatcaaatccctgatccgtcccgtcatcgacttccccaagccgggggtgatctttcgtgacatcacgccgctgttccaatcgccccgcgccctgcgcctggtggccgacacctttgcccagcgctacgtcgagaccgatttcacccatatcggcgccatggatgcgcggggtttcctgatcggttcgatcatcgcctaccaactgaacaaaccgctgatcctgttccgcaagcagggcaagctgcccgctgacgtgctggccgagggttaccagaccgagtacggcgaggccttcctggaagtgcacgccgacagcctgtgcgaaggcgactcggtgttgatgttcgatgacctgatcgccactggcggcaccctgatcgcggcggcgaacctggtacgccgcatgggcgcgaagatcttcgaagcggcggcgatcattgatttgccggagctgggtgggtcgcaacgtttggaagatatgggaattccaacgttctgcctgacgcagtttgcgctgactgaacaataacggttgcctgggctgatgccatcgggggcaacccccctcccacacttgaccggttcacagatcaaaatgtgggagggggcttgcccccgatgaggcgctgaaaggcactaaagatcagaagcccatctgcttactgatgatttcattcatcacctcgcgggtaccgccaccgatggagaggatgcggttgtcgcgatacagccgctccaccaggctgccacgcatataaccctggcccccgaggatctgcaccgcgtcgtaggtgacgcggtcggcggtgtcggtggcaaggttcttggccatggatatctccttgatcacgctgataccggcggccatctttgctgcctgccgataagtgaactcccgagagacctccacggcggtggccatttccgccaggcgatgcttgatcacctggaatttgccgatgggtttgccgaaggcttcgcgctcggcggcccatttgaggctttcctccagggccagttgcgcggtcatgttggccatgagcgccagggccaggcgctcgctctggaagttgcccatgatgcaggcaaaacccatgttttcggcgccgatcaggttgcctacgggcacccgacaatcgtcgaagaacaattcagccgtgtccgacgcccaccagcccattttcttcaggggctggccgacggtaaaaccgggggtgtctttttcgatcagcagcaggctgatcccggcaaagcccggcccgccagtgcggacggcgacggtgtagaaatcggcgcggatgccgctggtaatgaaggtcttgctgccgctgacgcgataatggtcaccgtcgcgaatggcgcgggtctgcaggctggccacatcggaaccaccgcccggttctgtgactgccagggcgatgatcttctcgcccgacagcacctgtggcgcgacgcgctcacgcacgtccggccgcgcccatttgacgacgggcggcaagccgatatccagcgagcccagccccgccacgacgccgccagaaccgcagcgcatcaactcttcgctggcggccaccttggcgaacagatcgccttcatggctaccaccgaggacttcgggataaccgatacccaggatccccgccgctcccgccttgaggtacaactcccggggaaagctttcggcttcctcccagtgctcaatccccggcagcatctcgcgctcgacaaagcgacgcacgctgtcgcggaccaattggtggctggggtcgaagtagtcctgataggcagacatcggcaagctccacggtgaggtggagcgaaattaccaagcgcttgcttggttatcaagccgtgccgtcagagggcgatcggtttgcggccggcaaacgaatgcgccagcgtgccaccatcgaccaattccaactcgccacccagcggcacgccatgggcaatgcgcgaggtgatcaggcctttgttggtcagcagttgggcaatgtaatgcgcggttgcctcaccttccaccgtcgggttggtggccaggatcacttcggtgaaagtgccctgctcttcgatgcgcgccaccagttgcggaatgccgatggcttccgggcccaggccgtcaaggggcgacagatggcccttgagcacgaagtagcgcccgcgataaccggtctgctccaccgcgtatacatccataggcccttccaccacgcacagcagcgtgtcgtcgcgacgcgggtcggcgcattgcgggcagagttcttcttcagtgagggtgcggcactggcgacagtggcccacgccggtcatggcctggctcaaggcctgggccaaccgggtgccgccgctgcgatcacgctccagcagttgcagcgccatacgctgggcggttttctggccgacacccggcaatgtgcgcagggcgtcgatcagttggcgaatcagggggctgaagctcatgggcgaagggtccgacaaaacaacgagacgcggtttatacccgcgccccggattagcgtcaaatgcgcaccaccaacttgccaaagttgcggccctcgagcaaaccgataaaggcctcgggagcctgctccagaccgtcgaccacgtcctcgcggaacttgatcttgccgtcgcgcacccacggcgccatggcgctgaggaattcaggctggcggtcaccgtagtcatcgaacacgataaagccctggatgcgcacgcgcttggtcaacaaggtacgttgcagtgtcggcaaacgatcaggcccgctgggcacttcatgggcattgtagccggcgatcagcccgcacaacgggatccgcgccttggggttcaacagcggcaccaccgcgtcgaacaccttgccgccgacgttttcaaaatagatgtcgacgccgttgaagcacgcctgggccaggtcatcggcaaaggtcgcgctcttgtggtcgacgcaggcatcaaagcccagttcgtccactacatagcggcacttttctgtgccccctgcgatcccgaccacacgcaagcccttgagcttggccacctgccccaccaccgagcccactgcgccggatgcggccgccaccaccagggtttccccggccttgggttgaccgatgtccatcaggcccatgtaggcggtcatacccggcatgcccagcacgcccagtgccatcgacgggctgggcaagcccttgggcaccggcatcaggttgcgaccatcggaaatactgtggctctgccaaccggtcgcgcccaccaccaggtcgcccacttcgaatttcggattgcgcgactgctcgatacggctgacagcaccaccggtcatcacttcgtcgatttccaccggcgccgcataggacggagcgtcgctcatgcgcccacgcatgtaggggtcgagggacaggtacagggttttcagcaggacctggccgtctgccagttccggcaggttcacccgctccaggcggaaattttccggggtgggtgcgccctgggggcgtgagaccaggacgatgcgctggttcagggtcggttcttgaggcatgaaggggctcctttatcgattccatcggtatagggtgcagaccatgcgtggcgtgccagggttcatattggacgcgaagcgtcggggggcggcattcccacgcagagcgtgggaacgatcagcccgctcgccacaacacgaacaaaaatgccaggcacaaggcctggcattggagtctagctaaagctcgtcgatcagaacggcagcttcatgcccggaggcagttgcatgcccgcggtgacgccgcccattttttcctggctgttggcttcgatcttgcgcacggcgtcgttgacggccgcggcgaacagcgcctcaagcatttccaggtcatcttcgcccacgcctggcaggacgctcgggtcgatgctcacgcgtttgatgtcgtgacgaccggtcatcaccacgctgaccatatcgccaccggctttaccggtgacttcggcgttggccagttcttcctgcatcttggccattttttcctgcatctgctgcgcctgcttcatcaggccggccatgccacctttcatcatgggaatcacctcaaaagtacgtggatcaataagtagcccggttttatgacgcctggggcaccggggcttcgacaggttcaatagtatcgtgacggacgaccgcaccgaactgttgcatcatttgctggatgagcggatcggcatggatcgaatcctcggcctcacgctggcggttgatgcgccggcgggtcgcggcctgggccggggtttcctgctcgggcttgatcagctcgatggcgatggtcaacgtacgctcatggtactggttcagcgcatcgttgagacgacgctgttgggtcgcgttgaacagggcgctgtgggccgggtccaggtgcaacaaccagtggtcgccttcaatggaaatcagcgtgcagttggcggcgatgctgccggtcatgccggagatcggcagtttcgggaacaactccagccattgcagggccaggccggtggccggcgccgcagcgggctccgcttccggctcgggggccggttcggcggtgtgctcgctggccagatcgtccaggtagctgtaggccgaatccatgtccggctcgatgtagtcttcgtccagcggtggctcgtcgtcgaggtcgatgcccggcgtggcggcttccacctgcgccacggtgggctcggggacgggtgcagagacccattcgggagcatccggcaccacgctgtcgggagtcggcgtgggcatcggcgtcagctcgggttgctcgccggtggtttccagcacgggctccacggcgggcacttgctcggcctcgacttcagcttcgaccggatcattccagggcaggtcgacgacgggctcaggctcgacaacaggttccggctcgaccactggcgcagccgccacaggttcaggcaccggcgcaagagcaggcgcagcaaccactggcgcagcaactgccgcgccagccactggtttggcggaatcaactgtggcctggctgatccccactggctttagcggctgtctcggcgcgtctgccgaatcggcgggccggaaggccagcattcgcagcaacaccatttcaaaaccgccgcgagggtcgggcgccaggggcaggtcgcggcgaccgatcaggcccatctggtagtagaactgcacatcttcggccggcagcgcctgggccagggccagcacgcggtcgcggtcgccatggccgttgtcgacgccttcaggcagcgcctgggcgatggcaacacggtgcagcacgttgagaatttccgagagcacgccgttccagtccgggccttgctccgacagatggcgcacagcttcgagcagcgccttggcgtcgccttcgatcagcgcgtgcagcacgtcgaagacctggccgtggtcgagggtgccgagcatggcgcgcacgtcggcggccatgaccttgccttcaccaaaggcgatggcctggtcggtgaggctcatggcatcgcgcatcgaaccatcggcggcgcggccaagcagccacagcgcgtcgtcttcgaacggtacgttttcgacgcccagcacatgggtcaaatgctcgaccacccgctcgggggtcatgtttttcagggagaactgcaggcaccgcgacagaatcgttgcaggaagtttctgcgggtcggtggtggccaggatgaatttgacgtagggcggcggctcttccagggttttcaacagggcgttgaaggaatggctggacagcatgtgcacttcgtcgatcaggtagaccttgaagcggccacggctgggcgcgtactgcacgttgtcgagcagctcgcgggtgtcttcgaccttggtgcggctcgcggcgtcgatctcgatcaggtcgacgaaacgcccttcgtcgatttccttgcacaccgagcaggtgccgcagggcgtcgaagtgataccggtttcacagttcaggcatttggcgatgatgcgcgcaatggtggtcttgcccaccccgcgggtaccggtgaacaggtaggcgtggtgcagccgttggctgtccaaggcattgatcagagccttgagcacatgggtctggccgaccatttcgcggaacgagcgcggacgccatttacgtgcaagaacctgataactcatcgaaaaccgtcgcaactgggaagcggaagccggtaatgctagcggagcaagggggaaattgcatccggcacgctcgcctaatctgactaagcttgccgggttggccccaaaaaggcctgaacccggagtgtgtatgcgcgtagtcctgggcgctttatggatgatcaccacggcttgcctggcagcgcccgcaccgttgcgtttctcggtttccgacagctgggcgatgcccctggtgcaattggagggcggccggcccacccagggcattttgtatgacctgatgttgagcctggctacccaggtcggcaggccggccgaattccatgtgttggcacgggcgcgtatctccagcgccatggagcatggcgatattgatgtgcgctgttatgtcacccaggcctgggtcgacgacgcgtccggcgattacgtctggagcgtgccgctgatggtgcagcgcaacctgttggtcagcacccacatccccccgaagccggtagagctggacacactcgcgccgcaggcgatcggcaccgtgctcaattaccggtatacgaccctcgacccgctgttcgccaaagaccaactcagccgcgacgatgcgcgtagcgaagagcaggtgctgcacaaactggtggccgggcgcttcaagtttgcggtgagcaacgaatggatactcgaccgtttcaaccaacgcctgccggtcggcaaacggctgcacaaggttgtggtgattgatgagcagcgcctgggctgtatcgtgcgcaacgccccgaatgtgccggtgcagcagatcctgcgcaccttgctgcgcatgcagcagtcgggcgagatcgagcagatcatccggctctacaccggtgagactcctgacagaaactgacagtgccgccttatagacttggcgccatcgaacacgcattcccaaggagcctgcatgaacaccctcgcccattacttcctgctgtacgtcgacagcccggccaccagcgccaacttctatagccgcctgctggacaagccgcccgtggaactcaacccgaccttcgccctgttcattctcgacaatggcgtaaagctggggctgtggtcgcgccataccgtggaaccggcgacccaggtcaccgggggtggcggcgaagtgggcttgtccctggctgacaaagccgctgtggacacactgcataatcaatgggtagcgcgcggcgcaaccatcatccagtcaccgaccaccctggacttcggctacaccttcgtcgcccaggacctcgacggccaccggctgcgcgcgttttgcctgagcgactgaccgccagcgcccctccaggctgatggcggctacactggccaacacgatcacaccgcccagcaccacttgcagggcgatgtgctcaccgagcagcgttgccgccatcgtcatcgccaccggcgggatcaggtacatcgccaccgatgcgcggctgacctcgacatgtttcaacacatagccccaggccaggtacgccagggcgctggggaaaatcccgagcaccagcaccgcgaggttctccggcaacggcgcctgcaccacggcagccgacaggcccggcaggttcacacagagcatcaaggtgccggcccagaccatgtagcaggccatcgtcagcgggctatagcgatgggcgtaatgtttctggatggcgaagtacaggctccatgacaccgccgccagcaggatcagcaagccgcgcgggtcgatatcgcccacgccgtgatcgccccagatcaccaccagcacgccgagcaaacccagcagcacgcagctccagcgccagaggctgacccgttccttcaagcagaagaacgcgatcaacacgctgaacagcggcgccgattgcgccagtacactggacgccgccgccgtcacgaactgctggccgtaattcaggctggtgtggtgcaggaacaccccgaaaaaactcaacaccaacagccacggcagatccctcagacgtggccgaccgatgcccagcatcagcgccacaccggccatgaacagcgaggcgatcagaaaccgcagcagcgcaagctggccagggctgtagctgtgcaggccgatgtgcacgccaatcggcgaataggcccaacagaggatgacgctggcgatgactagcgtaagcttcaggggtgacggggtgttcatcgacggcatccgaaacggggaaggaatgccgtcagtcttcgcccgagcaacgcgcaggacaattaaccgtttctgacttctgaaatcactggaactgagcaatggaactggcccaattgaaaatggtgcgagccgtggcgcaaaccggcagcgtggcccaggccgccgtgcaattgcattgcgtgccgtccaacatcaccacgcgcatcaagcagctggaaagcgagttgggcacaccgctgtttatccgtgccggacgcgggctggcgatcagtgcggccggtgagatcttcctggagtattgcgaacgtatcctggcgctggtggacgagtccaaacgcgcggtcgacgccaacgcgattccccgtggcaccctgcgtatcggcgctgtggagtccagcgccagcggacgcctgccgccgttgctggccgaataccatcggcgctacccggatgtcagcctggagctggtgaccggtgcctggggcgaactgctcgatgacctgcaacaccaccgcctggacgtggcgctggtggccgccggcaacaaacgcgcaaagctcgaacacagcgtggtctacagcgaacgcctggtgctgatcgccagcgcctccagcgcaccgatccgcagcgccgaagacctggccggtcgcacgctgctggtatggccgcccggctgcccttatcgggcggcgctggagaactgggtcaagccccacgcgttcaagccggccattgccagctatgccagctggggcacgatcatcggttgtgtcagtgcgggaattggcgtggcactggcgccggaaggcatcctggcccgctatgagcaggccaatcagctggcgtcgtaccggttcgaggaactgcaggcggtggacaacctgctgttctggcacaaggacacccagcggcacctggcgcgggatgcgtttgccgggttgttgcgcgaaactttcggctgatcagcttttgggggcagccagatggctgtactgatcctggctgatccacccggtaaacgagcggtcatcggcattgatgaactcgacctgggcccagccatccttgaaggccagcactccaaccacatcattcttgacgatgtacggacgcttggcggccttggcacttgggtttttcagcaggtaagccttgtcggcggacaccttcaccaggccgatccatttcgtgttggcggtctggctcaggtccaggccggtggcgatctccggcatcagcacattgaggcaacccggatgctggcggccttctgccacggtcagggtcacaccatcggacgagggtgccaggctgccggggtaggtggcgtcggcccaggtagtcagcgcagcgggtttgccttgcaggtagaacgtgcaactgcgggtgacgccctcgcccatcgcttccgagtagtaaccctccacctggtgctcaggcgtcaccgccagcatcagcccttcatacttgcccgaatgcaacgcgggcgaaccggcaaacgcaggggctacagcgcacaacgacaacacaccgatcgctagaaaacggatcatcttattttttcccttcaagtttctcgtaggctttttgcataaggacgtcatagttgccgtagtcctcgccgttatagttacgcgccatgccggtaaaatccttggctttcatggccttcatcaacgccgggctcttgctgcaaaaaccgaggaaggcctttagttggttaccggcattcacttttaatgccgcagaaaattcaaacaccgtcttgtaaccgcaggacgcgtagttgaaacccatgatctgaaacatgccccaggacgccgacatcaacgcggcttcctgatccagcgcaaacgcggtggccatggtttcccaggccttggtctggtccttgttattggtctgccactgtggcccggcctttttcttgtaggggtaggacagtagcgggtgcgcctggtcgtagatgtgcttggtgcacttgcgaaacaggtgcccttcgaaggcgattaccggcaatttggccgggccaaaacctgaacggccgccggattccacggtggcgaaggccttgatgatgttcaccgaaataccaccgcccaactgcgtggccgcgttctggaaatccgtctcgctgagggtcatgcccccgtcgcacgtggcctgcagcatcaattgacggttgcgcttctcggcctcgatcatcgcgcgcatgcggtccaggtacacattgaccgtggcctgcaccgcgtcaccctgattgttgccgaacacattcagaaagctcgggatacgcatgctcgggaacgcctttaccggcaccttcaccgcttcttcgatcaggctgttgaaggttttaccggtcgggtcgatcacgctatcagggtgggcatatttgagatgacggaattgatactggctgatgcattgcaccaattggccatcgcacttgccgttttcggccagcgggaagcccatttttggaatgatcagattgaacaagtattggacgcactgcacatcggcgggcaagttgcgggctttgccgggcgcgcctaccgaagcactgataagacggggcaacccttgcaggcttttcatcacagacatccttgttagttaaaaaagcgatggcacttcaatatcaacttcacacacttgtcacactctgaaacaagtggctggcggaaactaacaaggtggttttgggttgtaaagcatgcaattttaaagttgtgaaatagctatcggataacgtccagcacctggcatttctggtgagtcgcgtcagactctcgtaacgaaatggggtggagggacgcctgcccggtcaggtttgcttagcgtttccatgatttccctttaatatgcgatacccgcccaccaagcagagggatgcgctcaaatgcccggccagataatcgaatcggagaaacgactgtgaggctcgacaaactgcgcgtgcagaattaccgctgttttggagagtttgagatcgacttcgatcctcatctgaccgtcttgattgcatccaatgggggcggtaaaaccaccattctagatgctgcacgggttgccctatggccttttgtaaaaggcttcgacctcggaagccagaccggaaaatccgcgacaatacaaatcgacgatgtacgtctagccaatctctccagtggcaacatggagcctcaaatcgccagcattatcgaagccaggggcgtatgggcgccagacgaggttgaaagccattggttacagcagcgcacgagcttgaaaaaatcgaccaatacccttggtgatttgggttcgaaagctctgacgggatacagcaagtctcttcaggaaaaagtacgcagtgatgagaccgtcgtcttaccgttggtgagctacctcgggacgtcccggctttggtacgaaggccgctttacttcggcggcagcccaaaccacgctcgacaagtctgaatactccagaacatcggggtatctgaactgcctctcctactcgtcaagtttcaaaacgtttaccgcatggtacggctgggtctatcgcagctatcgggaagcgcaggtgattgctctggaacgcaatgcacagctaaccgatcttggtgttcggttcgcgcagatcatcaagtctgtcaaagcggcaattgatcaattgttacaggctccgacaggctggcacagcctggagtacagtgagagccatcaacagcaactgatcatgcaccatcccgaacagggcatattgcctgtagaaatgctcagcgacgggctgcgcaataccattgccatggttgctgatttagcgtttcgtgcctgcaagctcaacccacacttaggcgaaaaggctccgttacaaactcccggtatcgcactgatcgacgaggtggatatgtttctccaccctcactggcaacaagtaatactcggatccttgcgatcagcttttccagcgatgcaattcattgttactacgcatagcccacaagtattgagtaccgtacgacgcgaaaacattcgagtcattggcaaggacacgcacggcaacctggttgcctcacccccattggcaatgacctatggcgagcccagcaatagcgttttacacagcgtgatgcaggtagatccgcagcctccagtacttgaaaaaccagatttgttgctgctcaccgaatgggtggacaagggccgatacgacgagcaacctgccgttgaattaatggagcgacttacacgcgtattaagcgatcagcaccctcaacttcagcgcctgcagcgcagcatcaaacggcagagagcacttagaaaatgagggctattcaaaagcggggccttggtcctcatcaattgaataactcacatgcaaatccacccattacagccaaggcggctaccagtcgatggtcagggtttggctacaaacaacaggttttgacctatctgctggaagagcagtatgggctgtgctgctacagtgagatcagacctgatcaggtcggtctaggcctacacatagagcacgtcgaaaataaaagccagaatccacaacgtacctttgattacaacaatctggctgcttcagcattggatagccaaaccgatctgcacaccttcaaggggctcgcgtcagcagtgttcggcggtcacgccctgggaaagtcggacgcggtagatgtccatcgttttgtatcctgccaccagcctgattgcagccgcttttttgcgtacctttctgatggtcgcattgtgccggctgacgggttatccctggaagatgaagaccgagcgtcatacaccatcgccttgctcaacctgaatagcccatttcttcaagacttgcgccaacaatggtgggacgaactggaagcgcttttcgatgaccacatcgaacaggatatgagccttcattgccttgcaggtattgatctcattcctcgagaaaagcgactaagtccgttcttcagcatcacccgaaatttttttggccaaattgctgaagaagtgctggatcaagatgcacctaatctgaagtagttgagacctatgacttgatcagtaaccgtggaactccctggttttctgataggtgtggaaatcaatccactcgactacatcgtaaggcaggtaaagctgcatccgcgcgcgggaaatggcgatatacacctcgcacagccgttggtcgaacgcgtaggcgtccttgaacttcacgttggtcagcaactcgggcgtcagcaatacccggtcaaactccatgccgcccgcctctgccgccagcattagcaggcaacgcttgccgggcacgccgcccagtcggttcaagcgtgtgatgtcggcgacgttgaagcctttttccaactcgctctcgacccacagaaacgcttcatcgaactggctggcatcgcgcacctgttgccaatcgtccatgtcgctgaaatacgcatggggaccgttgtcgttgtgctcgttgctgtagaactgcggcttgaacaaggcgatgacgctgatcatgaagcgctgcagatcctgctgcgctgcagtgtcgaagaacccgaacgggcagttggcctgctgcaactggatggcccatttcatggtgtcccaatgggaggcggtcaacaccacgcagccttccggcggtacgaagccctgggggtaatgttcgatgccgacgtccgcgtcccgtgcgccttcgaagggggtcttgcacttttgtgagtgcacgctgatcaacgggttgaccaggcgctcgacgttgcggcccgagcgcaccgagtaactgatgtcggtgtgccggacttcgcgctttcttcgcaccatcacaccgctggccaattggtattcatcgccgagggtgatcaatacctggcggccacgctcgataatctgcaacaacgaaggcgggatgtcctggctttcatcgatcaacacgtgggtatagcgaggcggcaccacacagccttcgagactcgcacgcttgatcagccacaatgccgcgaaggcagtctggccggcccactgtgggttggcctccaggtacgtccacaaccggctggaatactccagcaacgcctgggtatccacgctggacaacgggtgcttgaaatgcggcaggtgcctggccgacaggctgtgatgactggagtggcaatagctttcgagcaccttcagacagatatccagcgtcgccacgccctcgtgcccccgccagccgtggatattcagggtctgcgacacttcatgcttgccgggcaacctggcaggcgtgccctgcacggatgggcgcggcccctgcagcagcgccttggcgaacgcggcgaaggtcgaacccgccttgctgtccttccccaaccccatgcgctcacgcagggtcgccagtttggcccctgtgcgtgccagcaccagggtctgggcggggcgcaggcactccatcaaggcgccgagcaggtggctcttgccgatgcccgcgtagccctggacatgcaggtcttcattgaggttggcgcggaaggtacgcaccagtttgtcctgggccgggctgagccagcgctcacgctggcggggcgtgatcatctgttggctgaatggatcattgctgcgcaggtggcggaccttatagccgatatcccatttgcccgtaggcagcaggtaatcccgcgccgcgacttcttcagccgacagcaggcgcaggttgacgcttttaagcgcgttgaaaccgaagtagagcttgcgcggatcgaacagtcgctgggcttcggacagcagcgtcgcagcgccccctgcccgcgtgtcgaccgaccagtcgagcaacttggccaggatgcgttcggcgcccgcgcaggtcaggtctttttccgcggcctgggccaggttctggatgaccagtacggcggccagttccgggtccgtcaggccagccagggccagggcgccgtccgtaccgagcagggccgtgcaggtttcatccgtgacaggcaggaagaccgggctggataaatcgaagtgttcaggttgcatagtgcctcgccgccagggaatcaggcattgccctgaccgcccagttcaaaccgatactcgcccagggagcccgacataccgccgcaatgagggcctgcgtcagccgcagacgccatcgcattgatctgttgctggagttcgaacacagccatatcgagcaaccgccgcaagtcttcggcgctctgcgcggccacgttcaattgcagcgtgcaggcgcccgccagcggtggctgcgcgggctcgtcaacgacttccgcagagcggatcatttccgcctggctgaggatttccgcgtgttcatcgtccatcaggtccagcaccctcgacaattccagggtctgctcagggtgggattgaatgcggtccttgatctccaggcggcgcatctgccattcccgcagtttttcgcgagtgaggtcgtcgactttttccacgtgtgctgtctccggatgccaggcactggagtatgccgccatggactgcccgatggcagatggcgtgaaagcatttttgatttggatttgaagaggtattgcaaggaagagcgttatggaggcaaccccaccagccacaccccggcacacaatgttcccgctgtggctgctgccttccggctctgaccaggttcacgggtaatcgttgcggggggaccgatggggtcaccataacgacgctggcctctcggcaagcggggccattgtaccgatctcatcggaagttacaaccgttggggccggattaaaaatatgaaggggttcaagtacttgtcaccgtcaacggcatctgtgggagggggcttgcccccgatgacggtacatcagccaataaacaggtgactgacccagcgccatcgggggcaatccccctcccacagcgctcatcattgtgccagtaccacctcatctgctcggccgccttcttcctggatcaccaggtgaatgaagtgcagcttggcgatcaccgctggaggcagcacaaagggataaaaatccggctggcccatgctgcgcgacagttcgttgagcatgccagccagttcgatccaagcgttgacgaatgacaggaatgccacgccgcccgggtgttcgggatcatagagcgtgctgaggggaaatggctggtaatccaggtccatctcgcgggcgctcatgccaaagccgagggcggtgtcgacggcatccatcatgtgcaggtagtgcgcccaggtttcagcccagtcttcccaggggtgcatggtggcgtaggcgctgacgcaggtttgctgccaatcggcgcgtgggccgtgctggtagtgctggtcgagggcgtcggcataactggcacgttcgtcgccgaacaggttgcgaaacggttcaagccagtgggtattggcgatcaggcgatcccagtaataatggccgacctcatggcgaaagtggccgagcagcgtgcgatagggttcgcgcatctggacgcggaccttttcccggtgggcgtcgtcggcttccttgatatcgagggtgatcaggccgttcgcgtgaccggtcatgggcgcgttgccctccaggtcgataccgacaaaatcgaaggccaggccggtgtcttcgtcgacgcttttgggcaccacttgcaaacccaggctgatcaattgcgcgaccaaccggcgcttggcggtttcgactttgcgccagcgctcgtggttttccgggatcgacaggtcaggaatggtgcggttcaggctgcatgccacgcacagcggcgcagtgctgtgcgccgggatcagccagttgcaggcggccggggtgtcgaggttggcgcagcggcggaaggcgccggcgtcgaggttaccgtcctgcagccaggtgccttcgaccgggccgggctgcagggagtccagccgggcttgttggggttggtagcccagcagcgcctggcaggccaggcactggctgttgcgaaagaacagcgattggccgcagcggcactgccacaccttgctgtcgcgggatgtgccggctacgaacggtgcagcgatgcgcgaactgagttgctcgaagtagcggaacatggcgatctctccctgggtgactgagactagatcactttctgttcaggatcgttccactttcgttagggttggggggctgctgcgcagcccgacgcggggcaagcccgctcgccacagcaagcccgctcgctacaaagtgcaaatcagacggtgatgttgtgcttggcaaggaaggagacgaaggcttcttcatccaataccttcaggcccagttcgctcgccttggccagcttggaacccgcccccggccccgccaccacgcagtgggtcttcgccgagacggaacccgccaccttggccccgaggctttcgagtttttccttggccacgtcacggctcatcagttccagggagccggtgagtacccaggtgtgccccgcttcgggcaaaccttcgacgaccttcttctcgctcaaccagtgcatgccgaagtccttgagctgctgctcgatggccagggcatggttggcgttgtctgcgttatcgaagaactcacgcacagccttggcctgcttttcgggcagcgcctggcgcatatccagccagtcggccttgatcacgccttccaaggtgccgaatttgtccgcaagtttctgcgcggcgccggggccgacgcttggcacatgcaacttgtcgagcaagccgcccagggtggtactggcggcgaattcggcactcaggtcgccctggtcctgcaattgcaggccgcattcgtctggcgacagcagcgcaccgatcacgtcctggttatggctgtcttcaaagaagctgtggatctcgtgcgccacttccaggcccacgtccggcaggtacgtcagcactgccggcaaggctttctgcacgcgctccagggatgccagcgaacgcgccaacaccttggcggtctcctcgcccacgtcgggaatgcccagggcgtagatgaaccgcgccagggtcggggtcttgctgttttcgatagcggtgatcagcttcttgctggaaatatcggcgaagccttccaggtcgatgatctgctcgtacttgagcttgtagaggtcggccggcgagccgatgagtttttcatccaccagttgctcgatggtcttgtcgcccaggccatcgatgtccatggcgcggcgcgagacgaaatggatgatcgcctgcttgagctgcgcaccacaggccagacgcccgacgcaacggtacaccgcgccttcgctgacggtttccttgcccttgctgcgcttgaccagttgcgtgcgctccacatgggagccgcacaccgggcagctctgcgggatcggcaccgcacgggcgtcttccgggcggcgctcaagcaccaccgacaccacctgcgggatcacatccccagcgcggcggatgatcacggtatcgccgatcatcacacccaggcgcgcgacttcgtccatgttgtgcagggtggcgttggacacggtcacgcccgcaaccttgaccggcttcaagcgcgccacaggcgtcacggcgccggtgcggccaacctggaattccacgtcgagcagttcggtcagctcttccatggccgggaatttatgcgcgatggcccagcgcggttcgcgggcgcggaagcccagttcacgctgggaggcgatgctgttgaccttgaacaccacaccgtcgatctcatacggcaggctgttacgccgctcgccgatgtcacggtagtactccaggcaatcctgaatgcctttggccaacttcagctcatggctgatgggcatgccccactgcttcaactgttgcaggttgccgatgtgggtgtcgctgatatcggtggtcacgccgtagcagcagaactccagcgggcggctggcggtgatcttcgagtccagctgacgcaggctgccggcagcggcgttgcgcgggttggcgaaggtcttgccgccgacttccagttgcgcggcgttgagtcgctcgaaaccggccttggacatgaacacttcgccgcgcacctccagggttgccggccagccactgccgtgcagtttcagcgggatgttgcgcacggtgcgcacgttgacgctgatgtcttcgccggtggtgccgtcgcctcgggtggcgccgcgaaccagctcaccgtcctgatacagcaggctgaccgccaggccgtccagcttcggttcgcagctgtattccaccgccgcgccagcgccgaacaggtcgcccaccggcaggtcgaggccttcggtgacccggcgatcaaactcgagcatggtggtttcatcaaacgcgttgcccaggctgagcatcgggatctcatgcttgacttgggtgaacgccgacaacgccgcactgccgacccgctgcgtcggagaatcgcgcgtcaccaggtccgggtgctcggcctccagggccttgagctcgtggaacaagcggtcgtactcggcgtccggaatactcggctcgtcgaggacgtggtagcggtagttgtgctgatccagttcagcgcgcagttcgaggatgcgggtgtgggcggcggtcatgggtgttctctcataaagcaaaagagcagccgaagctgctcaatatgttagtgcacggattctacagacaacgcttaagatcggacctcagcgcttctgtgtcagggcgcgacgctcgaactcgacgatgcgctgacggtagtgttcgatggtttgcgcggtcagcacgctgcgctggtcgtccttgagctcgccattgagctcctgggacaacttgcgggcggcggccaccatcacgtcgaacgcctgcttcgggtgacgcgggcctggcaggccaaggaagaagctcacggccggggtgctgaacaggtcgatatcgtccaggtcgaaggtgcccggcttgaccgcattggccatggagaacagcacttcgccgttgccggccatgctttcgtgacggtggaagatatccatctcgccaaaccgcaggccgctttcgaggatgttctgcaacagggccgggcccttgaagccagcagcgtcgcggcagatcacgctgatcaccagcacttcttcggcggccggctggtcgttcacggactggcgcggggcattcttgccggcgttttcgtcggggaaatcatcgtcgcggctgctgaagctcgggccgtcattgacgtcaaggtccaggtcagcctggcgcggttctgcgaccaccggagcggtgcgcttgccacgcttggatgacggctcgcgggcttcacgcaccggcgcgctcatcgacggcaagtcgtgctcgtccagttgcggttctttatgggtgtccagcacacggggcggccccagcagctcggcgctgccgtcgtcgtcgggcaagttggacaggttgcggtccagacggaatttgagcttgcccttgccaccgcgcatgcggcgccagccatcaaaaagaataccggcaatgacaataatgccgatgacgatcagccactcgcgcagaccgatttccatgtaatcccgtgcctctaataaaaaatgctgaaaaataaggggtttagcaacgtgcaaaccgctttaaaacgtggcgccaactctatgttctgactgacgttttgcccacgcatacgaaaatttgacattaaactagcacgaccaaagataactttacaccgtctgtcaaaatgccttgaacaaatatgtccatttgccactttcgccagaccggtaaagcctcttaccgcacgctacaaaaattctttgccggcatggatcaagactccaccatcgccatcgcttcttcgacatctaccgccaccagacgcgaacagcccggttcgtgcatcgtgacccccatcaactgatccgccatttccatggcgatcttgttgtgggtgatatagatgaactgcacggtctgggacatctctttgaccaaccgcgcgtaccgtccaacgttagcgtcatccagcggcgcgtcaacttcgtcgagcatgcagaacggcgccgggttcaacttgaagatggcaaataccagggccaatgcggtcagggctttctcgccgccggacaacaaatggatggtgctgttcttcttgcccggaggccgcgccatgatcgttacccctgtatcgagtagatcttcgcccgtcagttccaagtaagcgctgccaccgccgaaaacttttgggaataacgcctgtaaaccgccattaatctgatcaaaggtatccttgaagcggttacgggtttccttgtcgatcttgcggatcacgttttccagggtgtccagggcttccaccagatcggcgtcctgggcatccagataacgtttacgttcggattgctgctggtactcgtcgatggccgccaggttgatcgcgccgagtcgctggatacgtgcggcaatgcgctccagttcttcttcggcttctttctcgttggcctgggcggtcagggtgttgagcacgccgtgcaggtcgtagccgtcttccagcaattggtcttgcagggtcttgcggcgcacggtcagggcttgccattccatgcgctgctgttcgagctgaccacggatcaactgggattgctgttcggcctgggtccgacgtttttcggcgtcgcgcagttcgcggtcggcgtcttcgagggcgatctgcgcggtcttgagttcttcgtcgacggtcatgcgcttgtcgagcaattcttcgagcttcaggcgcagctcttccagcggcgcctcgccctcctccaggttgaggctcagttgctcgcgcttttcggtcaggcgttcggactgcatctccaggcgctcaagggcttgggcggtggacgcgtgctgggccttgagcgaccccaggcgcacggccaactggtgggcgtggtccttgtgctggcgcgcttcctggcgcacacggtcgaggcgttcgcgcaggctgtcacgctgggccagcaacagttcgcgctgctcggtatcgagggccatgctgtcgagggcttcctgcaactgcaggcgcgcttcgccgatctgttcgtgttccagggcgcgctgctcgcccatttccgcgacttcttcgtcgagacgggtgcggcgcagggtcagttgctcgaccttggctttgctcgcggaaagctgggccttcaattcgccttgctggcgcgcttcgtcctgcaacaggcggcgcaggtgttcgcggccggtctcttgctggcgctgggtggcacgcagggtttgcagttcgatttccaggctttccagggtggcttcgcgctcttcgcgctcggcgatcaggttgacgatttcctggccacgggccaacacgccgctttccgcttcactggcgcgacgcacgcgcaggaagtggcgaccgacccagtagccgtcacggctgatcaggctttcgccagcgcccaactgaacgcgctgggccagggcctgctccaaagagtccactggcttgacctggcccagccacggcgacagatcaatcgccgcttcaactttatccagcagactccctggcacccgcgtaccgtcagcagctgggctgagcaaacgcaggtcgccctgggcaaaaccggccaggtcgaagccgccaaagtcatccaccaacaccgcttgcaggtcggcgcccaagacagtttccaccgccagctcccagccggcctcaactttcaagccttccgccaaacgcgggcgctcggccaggtgctgatcgcgcagccattcggcggtgccggtgcctgggtctaatgcagcttgctgcaacgcctcaagggaggccagccggccatcgagccgctgcaaatcaccctgggcctgttgctgtgcctgggtcgcctgttgcaactgctgacgcaactgctccaggcgttccacttgttgttcttcgctggcttccagctcttccagcgtcatttcgctttcggccagttgctcgctcagctccatgatcgccgcgtcttccgggtcggcggacagcaacgcacgctcttcctgcatacggcgttggcgctcggccagacgctccatactgctttccagctgctggatgcgtgactgctgcacttcggcctggcgccgtggttcggcagacttcaggttgaaggtgtcccactgctcctgccagccatgcatggtggcttcggattcttccagggcggcggcggcctcttcggcggcggcactggtgacttcctgctcaggggtgagcatgtccagctcttcgccgagggtcagcagcaaggtgcggtcgtggcccaggtgggattcggtctccaggcgcgcgcgctcggcttccttgaggtcatcctgcaactggcgcaggcgctgctggccgtgctggatgctctgctcgacgcgggcgatatcgcctcccaccgaatagaagcggccctgcaccagattgaagcgctcggacaggtcatgatgaccgtcacgcaggcgttcgatgctagcgtcggcattgcgctgctcggccaccagggcttcaaagctgatctcctgggtgccgatgatcgcttcgcgctggcccacctggtcattcagcgcctgccagcgcagggccgacagttgtgccttgagctggcgttcctcacccttgtattcctgatacttctcggcggcctgggcctggcggtgcaggcgctccaactggcgctccagctcttcgcgcaagtcggtcaggcgggcgaggttctcgtgggtgcggcgaatgcggttttcggtctcgcggcggcgctccttgtacttggagatgccggcggcttcttcgatgaagttacgcaggtcctcgggcttggcttcaatcagcttggagatcatgccctgctcgatgatcgagtagctgcgcggccccaggcctgtgccgaggaaaatatcggtgatgtcccgacggcgacacttggtgccgttgaggaagtagctgttctggctgtcgcgcgtcactttgcggcggatcgaaatttccgcgtaggccgcgtactcgccgatcagggtgccgtcggagttgtcgaacaccagttcgatgctggcctggctcaccggcttgcggctggtggagccgttgaagatgacgtcggtcatcgactcgccacgcaggttcttggccgagctctcgcccatcacccagcggacggcgtcgatgatgttcgacttgccgcaaccattgggcccgaccaccgccgccatgttactggggaagttcaccgtggtcgggtcgacgaaggatttgaaccccgccagtttgatgcacttgagccgcacgtttaggcgtccgccaacgcagcgatgaccagcgagcaactgcgctggccgtacgccgacagcaccaggcgaatctgcggcaagtcacgggcaagtacggcggcaagcagttgctcgaacaacgccaggtattcgctcatggaggccttgcgttgatccagcgccaggtaataggcgcggttcatcgccggctgcaggttctcgacggtttcctgcaaatacgggttattggcgaaggggtacgcggcgcgcatcacgttgaagctttcttcgacgaaagcgcggatgtcctcgcgctcgtaactggtcaccaggcgctgctggatctgcaggaacggcgccatgtcggcctgcacctgccagccctgggccaccgcattgccgagcaggatgtacagctcgcccatcaaggtgcacaggctctgcaccttgtgcgccgttaactcggtgacgtgggcgccacggcgcggaaggatcgcgatcaggtgacggcgttcgaggatcagcaaggcttcgcgcacggaaccacggctgacattgagcgccagcgtgaccttctgttcctggatccgctccccaggcttgagatcgccgcgaatgatgcgttcggcgaggtggtgagcaatttgctcggcgagactgtccggcgccttgaacgtcatgttttcccttcaaaatcttctatcggtacaagcgcggcagtgtagcgcattggctggctgatggcgctacgcccaccgtggcgaatttggcacggaataagcagcgatgaacagccacaagcccccaaaaacaccggttccagaagactggaccataattgaaagtgttgcgatcgcattttcttgaccttccggtcagaaaatcattgaccgaaaagtcagagatgactagattcggcgcaaagcggttaacaacaataatgagtctgcgaggccttccgtgatccagtttttacttaaccaggaactccgtagcgagcacgccctggaccccaacctgaccgtgctcaactatttacgcgagcatttgggcaaatccggtaccaaggaaggctgcgccagcggcgattgcggggcgtgcaccgtggtggtgggcgagttgcacaccgatgatcagggcgccgagcagattcgttatcgcagcctcaattcgtgcctgacctttgtctcgtcactgcacggcaaacaactgatcagcgtcgaagacctcaagcaccagggccagctgcacagcgtgcaacaggccatggtcgagtgccacggttcgcaatgcggcttttgcacccccggtttcgtgatgtcgttgttcgccctgcaaaagaacagcgaagcccccgacagccagaaagcccatgaagccctggccggcaacctgtgccgctgcaccggctaccgcccaatcctcgccgccgccgaacaggcctgctgcaacaagccccaggaccagttcgacagccgtgaggcgcagaccatcgcccgcctcaaagccatcgcgccgacccagactggagaactcaacagcggcgacaaacgctgcctggtgccgctcaccgtcgccgacctggccgacctctatgacgcctacccgcaagcccggctgttggccggcggcaccgacctggcgctggaagtgacccagttccaccgcaccctgccggtgatgatctacgtcggcaacattgaagaaatgaagcgcatcgacgacttcgacgaccgcctggaaatcggcgccgccaccgccctctccgactgctacaccgcgctgcaccatgcctacccggacttcggcgagttgctgcaccgcttcgcctccctgcagatccgcaaccagggcaccctgggcggcaatatcggcaatgcgtcaccgatcggtgattcgccgccgctgctgatcgccctcggcgcgcagattgtgctgtgcaagggcaatacgcgtcgcaccctggcgctcgaagactacttcatcgattaccgcgtcaccgcccggcaggacagcgagttcatcgagaaaatcatcgtgcccaaaggccacacgctgttccgcgcctacaaggtgtccaagcgcctggacgatgatatttccgccgtctgcgccgcgttcaacctcaagctcgacaacggtgtgatcagcgacgcccgcgtagcattcggcggtatggccgccacacccaaacgcgccaaaaactgtgaagcggtgttggtcggtgccacctggaacagcgccaccgtggaaaaggcctgcgccgccctggcccaggacttcaccccactgtcggacttccgcgcgagcaaggaataccgcctgctcagcgcgcagaacctgctgcgcaaatacttcatcgaactgcaaacgccgcacatcgagactcgggtgaccgcttatgtctaaccatcacgccgtcgttaaaacccaggccgaactcgccgcactgtttgcccaggacctcacttccggtgtgggccgcagcgtcaagcatgacagcgccgccaagcacgtatccggcgaagcgcagtacatcgatgaccgcctggaattccccaaccagttgcacctgtatgcacgcctgtccgaccgcgcccacgcccgcatcatcagcatcgacacggcgccctgctacgcgtttgaaggcgtgcgcattgtcatcacccatgaagacgtgccgggcctgaaagacatcggcccattgatgcccggcgaccccttgctggcgattgatacggtgcagttcgtcggccaagtggtgctggccgttgctgcgcgtgacctggaaaccgcacgcaaggccgccatggcggcggtgatcgaatacgaagacctggagccggtgctggacgtggtcgaggcgtttcgcaaaaagcacttcgtgctcgacagccacacccaccagcgcggcgattcggccggcgcactggccaccgcaaaaaaccgcatccagggtaccctgcacatcggcggccaggaacacttctacctggaaacccagatctcctcggtgatgcccaccgaagacggcggcatgatcgtctactgctccacgcagaaccccaccgaagtgcagaaactggtggccgaagtgctcgacgtgtcgatgaacaagatcgtggtcgacatgcgccgcatgggcggtggtttcggtggcaaggaaacccaggcggccagcccggcgtgcctgtgcgcggtggtggcacgcttgaccggccagccgaccaagatgcgcctgccgcgcgtggaagacatgctgatgaccggcaagcgccaccccttctacatcgaatatgacgtgggctttgacgacaacggccgcctgcacgggatcaacctggaactggcgggcaactgcggctgttcgccggacctgtccaactcgattgtcgaccgtgcgatgttccatgccgacaactcgtattacctgggcgatgcaacggtcaacggccatcgctgcaagactaacaccgcgtccaacacggcctatcgcggcttcggcggcccgcaaggcatggtcgccatcgaagaagtgatggacgccatcgcccgtcacctggccctcgacccactggccgtgcgcaaggccaactactacggcaagaccgaccgcaacgtcacccactactaccagaccgtcgagcacaacatgctcgaagagatgaccgccgaactggaagccagcagccaatacgctgagcgccgcgaagcgatccgcctgtacaacgcccacagcccgatcctgaaaaaaggcctggcgctgaccccggtgaaattcggtatctcgtttaccgcgagtttcctcaaccaggccggtgcgctgatccatatctacaccgacggcagcatccacctgaaccacggcggcaccgaaatgggccagggcttgaacaccaaggtcgcgcaggtggtggccgaggtgttccaggtggaaatcgaccgcgtacagatcaccgccaccaacaccgacaaggtgccgaacacctcgccgaccgccgcctccagcggtgccgacctgaatggcaaggccgcacagaacgccgccgaagccatcaagcagcgcctggtggaattcgccgcacgcaagtacgacgtgagcgaagcggatgtggagttccacaacggccatgtgcgcgtgcgcgagcagatcctgacgtttgaggcgttgatccaacaggcgtatttcgcccaggtctcgctgtcgagcacgggcttctacaagaccccgaaaatcttctacgaccgcagccagtcacggggacggccgttctactactacgcgttcggcgcggcgtgctgcgaagtaatcgtcgacactctgaccggcgaatacaagatgctgcgcaccgacatcctccatgacgtgggcgcgtcgctgaacccggccatcgacatcggccaggtcgaaggcggcttcatccagggcatgggctggctgaccatggaagaactggtgtggaacgccaagggcaagctgatgaccaacggcccggccagttacaagatcccggccgtggccgacatgccactggacctgcgggtgaagctggtggagaaccgcaagaacccggaagacacggtgttccattccaaggccgtgggcgagccgccgttcatgctcgggattgcttcgtggtgcgcgatcaaggatgccgtggcgagcctgggtgactatcgccatcaacccaggatcgatgcaccggccacgccggagcgggtgttgtgggggtgtgagcagatgcggcagttgactgcggcgaaggtggttgaggcggataccgagatggcctcgctctagaccgaggcgctgccatcgggggcacgccccctcccacactttgatctgtgaataccttcaaatgtgggagggggcttgcccccgatagcggcctgacagacaccacaagaggtgactatgaacaactggatcagcgccctcgccgacctgcagaaccaaggcgaaccctgcgtgctggtgaccatcatcgaagagctcggctccacgccgcgcaacgccggttcgaagatggtgatcagtgccacgcagaccttcgacaccatcggtggcgggcacctggaatacaaggcgatgcagatcgcccgcgacatgcttgtgcgcggccagcagaacacccatctggagcgcttcagcctcggcgcgagcctgggccagtgctgcggtggcgtgacggtgttgctgttcgaacccatgggccaggtgcaggcgcaaattgcggtgtttggcgccggccacgttggccgtgcgttggtcccgttgctggccagcctgccgtgccgggtgcgctggatcgattcccgtgatcaggagtttccagcacatatcccccagggcgtgcgtaaaatcgtcagcgaagagccggtcgacgaaattgccgacctgtcggcgggcagttactgcatcgtcatgacccacaatcatgcgctggacctggaactgaccgccgccctgctcaagcgcaatgacttcgcctacttcggcctgatcggttcgaagaccaagcgcgtcaagttcgaacaccgcctgcgcgatcgcggcttcgacgccgcgcagctgcaacgcatgcgctgccccatgggcctcaccgaggtgaagggcaagttaccggtggaaatcgccatctccatcgccggcgaaatcatcgccacctacaacgccaatttcggccagcacaccgccagcgccgaacccattgccaaactgctgccggcttcacgtcgcagccaagccatttgaaatgagatcaccatgcctttgactcgcaaagcctaccgtgccgccctgctgcacagcctcgccgaccccgctgaagtgggcatcgaagcctcctacgagtacttcgaagacggcctgctggtgatcgaaaacggtcaaatcagcgccatcggccgtgccagcgatttgctgccgaccttgcccgccgacatcgacatcacccattaccaggacgcgttgatcaccccgggcctgatcgacactcacatccacctgccgcagaccggcatggtcggcgcctatggcgagcagttgctcgactggctcaacacctacaccttcccgtgcgagagccagttcgccgacaaggcccacgccgaggaagtcgcggatattttcatcaaggaactgctgcgcaacggcaccaccaccgcgctggtgttcggcagcgtgcacccgcagtcagtgaattcattctttgaagcagcagaaaaactcgacctgcgcatgatcgccggcaaggtgatgatggaccgcaacgcgccggactacctgaccgacaccgctgaatccggctaccaggaaagcaaggcgctgatcgaacgctggcacggtaagggccgcctgcactatgcggtcacgccacgctttgcgccgaccagtacgccggagcaactggcactggccgggcaactgctgggcgaatacccggacctgtacatgcagacccacatcagcgagaacaagcaggaagtcgagtgggtgaaggagctgttcccggagcgcagtggctatctggatgtctacgaccactacaagttgctgggcgagcgttcggtgtttgcccatggcgtgcatttgtgtgatgacgagtgtgcacggttggcgcagacgggttcggcggtcgcattttgcccgacctcgaacttcttcctcggcagcggtttgttcaacctgccgatggccgaaaagcacaaattgaatgtgggcctgggcaccgatgtggggggcggcaccagtttctccctgctgcaaaccctgaacgaagcctacaaagtcatgcagttgcagggcgcacggttaagcccgttcaagtcgctgtacctggcgaccctgggcggtgcgcgggcgctgcggctggaagacaagatcggcacgctgcaaccgggcaccgatgcggacttcctggtgttggactacaacgccacgccactgatgagctatcgcctgaagcaggcgaagaacattgccgagacgttgtttgtgctgatgacactgggggatgatcgcacggtgttgcagacgtatgcggccgggcaattggtgcaccagcgctaattccataaacaccccaaaacaaatgtgggagggggcttgcccccgatagcnnnnnnnnnnnnnnnnnnnnnnnnnnnnnnnnnnnngctatcgggggcaagccccctcccacattgttggtcgtatttacaactttatggacgagcgccccggcttcttggtctgcaacaaatgcgaaaacaccgcatgcaggtcatccgacgcgctctcttcatcgaggttgagcttgctgtcgatgtgatccatgtgatgcatcatcaaattcactgccaacgccgcatcccgtgcttcgatcgcatcgatcaactgggtgtgctcgtcataggaacagtgcgagcggttgccgctttcgtactgggcgatgatcaatgaggtctgggacaccaggctgcgctggaagctgatcagcggcgcgttcttcgccgcttcagccagcttgaggtggaactcgccggagaggcggataccggcaccgcggtcaccacgggaaaagctgtcgcgttcgtcgttgaccatctggcgcagttcggccagttgctcagccgtggcgtgttgcaccgccaactcagtgatcgcccgctccaccagacgccgcgccaggaacacctggcgtgcctcctcgacgcttgggctggccactaccgcaccgcgattgggccgcagcagcaccacgccttcatgggccaggcgcgacagcgcgcggcgaatgatggtgcggctgacgccgaagatttcgcccagtgcctcttcgctcaacttggtaccgggtgccaggcgttgttcgaggatcgcctcgaagatatgcgcgtagacgatatcgtcctgggttccgctgcgaccggccttgccggcacgcggttgtttcttgagaggttgcaactgttcgttcatgggcactcgggtttggagaacggcggcgaattaacggtaatacggcaacagcgtgtcgctggcaagtatcacctaaaaacagggcacattgtacacaacccactgcgccaacacactgtacggctgtttgcggcgtcggctgtattgcaatgagtcgctgcgtttgagtttaggcttgaatccgcaacttccctggtaaaaggaacacctgttcatgaccgacgccacccaagcgcctctgcgcccactggccgacacctctgcgtcggccgtcgtcgccggcttcatcgccatgatgaccggctacaccagctccctggtcctgatgttccaggcggggcaagccgccggtttgaccacggcgcagatttcctcatggatctgggcgatttccatcggcatggcggtgtgcagcatcggcctgtccctgcgctatcgcacccccatcacgattgcctggtcgacacccggtgccgcgctgctgatcaccagcctgggcggtgtgagttacggcgaggccatcggcgcgtacatcacctgcgcggtgctggtgacgatctgcggcttgaccggcagctttgaaaaactggtcaagcgcatccccgcgtcactcgcggctgctttgctggcggggattctgttcaagatcggcagcgagatcttcgtcgccgcacagcatcgcaccgggctggtgctggggatgttctttacctacctgatcatcaaacgcctgtcgccacgttatgcggtgctggccgcgctgctgatcggcaccgcgctgtcggggttgatggggctgctggacttcagcggtttccacctggaagtagcaacccccgtgtggaccacgccgcacttctcgctggcggcgaccatcagcatcggcatcccgttgttcgtggtagcgatgacctcgcagaacatgcccggcatcgccgtgctgcgggccgacggctacaacgtgccggcctcgccgctgatcaccgccacggggctggcgtccctggtgctgtctccgttcggctcccacggcatcaacctggccgccatcagcgcagcgatctgcaccgggcctcacgcccatgaagaccgcaacaagcgttataccgctgccgtgtggtgcggggtgttctacgggattgccggggtatttggcgcgaccttggcagcattgttcgcagccttgcccaaggaactggtgctgtcgattgcggccctggcgttgtttggctcgatcatcaatggcctgagcatcgccatgaatgagccgaaggaacgtgaagcggcgctgatcaccttcatggtcacggcgtctggcttgacgctgttttccatcggctcggcgttctgggggattgtggcgggggtgttgacgctgctgatcctgaactggcgtaaggcataaaaaaacggcgaccttcaggtcgccgttttttttcagtatcacttagccgcgttgatcggcttttccggataccacacgtccagcagcgggctgacttcagccttggtcagctcggaacggtttttcagccaggcttcaacggccgcacgttgctcttcggagaccgagccgcgcttctgcaggcaaaccagaccgtagtcatcgccgccgacgtagcccaggccattggcttccatggcttctttgatgaatgcttcgaggaaagcgtcgatagcttcttcactcaggccttcgttgaagtccaggttcagttcgaaacccagctcttgaaattcatcaacgcacagttttttgcgcagacgctgggaacggttagtcgccattggaacaatcctcataagtaataacgggcggcactttagcagtttaaggcggcgattgcccgattctctgggacaggcggcacaacgcctgtgaaaaaaacgccgaatacccgctatggttcagctacaagtggcttaaccttggggcataatgccgacactttcatgaccattgagggatttttcttatttacccctcgcctttttcaccctcctcagcagtagggttttacttcttatgatcaaatcgttgcgttccgtcttgtttgccggttttattctgccactggccttttccgtctccgctgcccccgtcaacaacaccctgccacccaatgttcaacaggcgctggccaaagccaaactgcaaaacactgcgctgtcgttggtgatgatccccctgaacggcccgggcacgcccactgtgttcaacgccgacgtgtcggtgaacccggcctccaccatgaagctggtcaccacttacgcggccctggaaatgctcggccccaaccaccagtggaaaaccgagttctacaccgatggcaccctcagcggtggcgtgttgcacggcaacctgtacctcaagggcggcggcgatcccaagctgaacatggaaaaactctggctgttgatgcgcgacctgcgcgccaacggcgtacagcaagtcactggcgacctggtgctggaccgcagtttcttcaatcagccgcagttgcccgaattcaatgacgacggcaacgacgaaaacaaaccattcctggtcaagccggacgcgctgctggtcaacctcaaggccttgcgcttcgtgacccgcaatgattcaggccgggtactggtgtcggtcgagccgccgattgccagcatccgcatcgacaaccaggtcaaggtctccaacgccaagcagtgcaccggcgacgtacgctacaacccggttaccgccgccgatggcagcgtgacggtaacggtcagcggccagttggccgacggctgcagctcgcagacctatctgtcgctgctggaccacgccacctataccgccggcgccgtccgggcgatctggaaggaactggggggcaccatccagggccgtgacatccaggcgccggtgcccaaggatgccaaggtactggcccgggcattttcgccggacctggcggaaatcatccgcgacatcaacaaatacagtaacaacaccatggcccagcagttgttcctgagcctgggtgcgcagttccgcaatgatgccgatggcgacgatgccaaggctgcacaacgcgtggtgcgccagtggctggcgaagaaaggcatcaccgcaccgcacctggtgatggagaacggctccggcctgtcccgtgccgaacgggtcagcgcccgcgagatggcggccatgctgcaagccgcgtggaaaagcccttacgcggcggaatacatcagctcgatgcccatcgccggcaccgacggcactatgcgcaaacgcctgaagaccaccgccatgcgcggcgaagcccacgtcaagaccggcaccctgaacaccgtgagagccatcgccgggttcagccgcgacaacaacggcaacacctgggccgtggtggcgatcctcaatgatccaaagccatggggtgcttcgtcggtgttagatcaagtgctgctggatttataccgccagccgaaggtcgccgcggcagcaccggtcctgtaggagcgagcttgctcgcgaaaaactcaagaacaccgcgtttatcctggatagacgcgatgggattgacgatcttcgcgagcaatctcgctcctacagaaaagcatcaagcgcgcaggcgctccgtctccacccgatccctgcccgcctgcttggccacatacacggccgagtcggcgcgcagcagcagcccgtcgataccttcatccacccgccaactggccacgccgaagctggcggtgacgatgcctaccggttccatcggcgcactgcgcagcgacgcccacaactccatcgccaggctgtaggcctgagcgccatcggtgtgcgggcacaacaccatgaattcctcgccgcccaggcggcagaacacatcggtacggcgcaggcgctggctgatgcgtttgcacaactcctgcaataccccatcgccgacggcgtgcccatgctggtcgttgatgcgcttgaagtgatcgatatccagcatgatcaccgacaaagcccccgaggtgcggttgagcctgaccatctcggccttgaggcgatcctggaaatagcggcggttatggatcccggtcagggagtcggtgatggagagcgcacgcagctcttcttccacccgtttcagatcggaaatgtccgacacgtagccgtgccacaacgtgccgcctgcgggtaactcttccggagtggcttcgccacgaatccagcgcaggccgcggtgcggcaacagcacccgatactcctcacgccaatgactcaactgcaacgccgacaagcggatcgaagcgcgtacccgctccgcatccagcgggtggatgcgctcgaagacctgcttggcatcctgctgcaatatgctgggctcgatttcatagatgtcgcgcatgccgtcgctggcgtagataaatttccagttgtcgtggggttctaacgtgaactggaagatgccgccgggcacatgggcgctgagtttcttgagcagccgatcccgggccgccaatgcctcgtaggcgcgcttttgttcggtaatgtcgaggtaaatcgccaggtgaccgatccacaaaccatggtcgtccagcaacacggtggccaacatgttcaccgtcagttggctgccatcctcacgtaccagggtccactcgcgggcttcgtgcaggttgtcggggctttccaccagcatcgcctggcttgccgggatgcgtttgcccagggccacactgaggctggcggagcgcgcttcgagttccgacgccaggtgcaggctttccagggtgtgcgtgcccatcacctgctcggccttgaaccccagcatctgctcggcaccggcattgaaggtattgatgacaccgcgcaggtcggtggcaatgatcgcgacctgcgttgcggcattcagcacactgcgcaattggccatgggcgccgcgtaactcctgctcgcgcaggcgcaactgcgccgtgcgctgctccaccagtttcaacgcgcgctggcgttggctgaccagcacatagagcagcgcgctgagcaacaggctgagcaggccgcccatggtcaggatcgtgctcaacgaggagtggttggcctggtcgaacacttggctcgggcgcagtttcagggcatacacatggtcgcccagcgtgaggcggcgcgctccgacaagatcaccgccggccacggcattgccggactcgaacagtacgcgctgttgcacgtcggaggtgtcgatgatctgcatcaccaggttgtcgcgatccggcttgggcaaaccgtcggccaccaactggcgcatgctgatcaccgccatgacatagccgtagggctcattctgggattggtcggaggtaggcaaatgactcaccggcgcgaccaatagaaccccggtggcataggccggttccacgcccaccagttgcatgggctgggacaccgccagcttgccggtcttttgcgcacgctcaagggccgaacgccgcaggggctgggccagcaagtcaaaaccgaggggtgcgcccagcaggctttgggtctggctgtacaagaccggcacgtattcatcgcgctcgggcgcaggggccaactcacccagtgaattcaactcacggataacaaaaggtgtgccgcgctgctcggacgcagttcgctcgaactgactgcgctgttcgcgatacacacggggcgcccaggagtaagcgcgcgcccgcagtagtaagggctgggcaaaaccgtcgaattcttcgcgggacacgtcatcggaattgacgaagaaacgccgcaggctgttcaggcgttgctcctgatcatcgaagcgttcctgcaggcgggtgtagcgctcgttgaccagcatctgaaagcgttggcgcacttgctgctgatagaggtcggcggcggcccaggcaacaacagccgtcaaggcaaacccggccagcaataccaccaatgccaccagccaagccgacgcctgttcactgataaagcctaggattttcgggcgaacggcttgcaacggcataggtaacactcacaacgccagcgtgcggggggtgtcacttggcttggccttaagttatagccatcgaccttgagtttgaccagcgtaaaaaagccgcaaacccggaataatccaggcttacggctcttttaacagcagggatcagcgcgcggtgattttccatgcccggtggatcttcgcattgcgtgcgaagtcggggtcgatggtcttgtcgctgatttcctcgaccgcatagcgctcgctgaggttgtcctccagtgcgaacttgcggaagttgttcgagaagtacaacacgccgcccggcgccaggcgcgccatggccaggtcgagcaactgcacgtggtcgcgctgcacgtcgaagataccttccatgcgcttggagttggagaaggtcggcggatcaatgaagatcaggtcgaactcatcgcggctcgcctccagccaggccatcacgtcaccctgctccaggcggttcttgtcagagaagccgttgagggacaagttgcgacgggcccagtccaggtaggttttggacagatcgacactggtggtgctgcgcgcgccgcccttggccgcgtgcacactggcggtggcggtgtagcaatacagattgaggaagcgcttgccggccgcttctttctggatacgcagacgcatcgggcggtggtcgaggaacaggccggtgtccaggtagtcggtgaggttgaccagcaacttcacgccgccttcgctgacctcagtgaacttgccctgggcgctctgccgctcgtactgcttggtgccgctttgacgctcgcggcgcttgactaccacgcggctcttgtcgatgttcagcgcctggggaatcgcggccagcgcatcgaacatccgcgcggaagctttttccgggtcgatggacttcggcgcggcgtattcctgcacgtggacccaatcgtgatacaggtcgatggccatggagtattccggcatgtcggcatcgtacacgcggtagcaatccacaccttcgcgcttggcccacttgcccagtagcttgaggttcttttgcaagcggttggcaaacatctgcccgccttcactcaggcgcgcctgctcgaccaccggggcaggagcgggtttgatcgggttaccgttcttgttgtactggcgctcttgcggctcggccggggcctggtcgtaggcagcttgctcacgttcggcctggcgctgttccggggtgcgacgctcgccggtgacaaactgatccgggttgaccttgatcagcagcaatttgcacggcaacgcaccgttccagaacgaatactgcttgtggctacggatgcccatgcgcttgcccagatccggcgcgccggtgaacaccgcggcttcccagcccatgcacgcctggcgcagacgctcgccgaggttctggtagaggtacaacaggctggcttcgtcacccaggcgctcgccatacggcgggttgcagatgaccaggcctttctggttctggtccgggcgcggctcgaaggtgccgacttcgccctggtacaccttgatccagtggctcaggcctgcacgctcaatgttgttgcgcgcaggctggatcagccgcggatcggcttcgtagccacggatccacagtggcggcttgttcatgccgatggcggcgcgttcagcggcctcggcatgcagtttcttccacagggccgggacgtgaccgagccaggtggtgaacccccacagctcgcggttcaggttgggggccatgtcagcagcgatcattgcgccttccaccaggaaggtgcccacgccgcacatcgggtcgctcagcgcgccgccttcagcggcgatgcgcggccagccggcacggatcaggatcgcggccgccaggttttccttcaacggtgccgcaccctgctgcaggcgataaccgcgctggtgcaggctgtgcccggacaggtccagggacaggatggcttcgccacggtccaggcgcaggtggatgcgcaggtccgggttgatcttgtcgatggacgggcgatcgccggtcggggtgcgcagcttgtcgacaatcgcatccttgaccttcagcgcgccgaagtgggtgttgtcgatgcccgaaccgtggccgctgaattcaaccgccagggtgccgtcggggaccatgtggtcggcccactcgatatccagcacgccgtggtagaggtcttcggcgtccttcatcgggaagcgcttgagcaccagcagcacgcggttggccaggcgtgaccagaggcacaggcggtaggcggtttccatgtcggccatgccgcgcacggccgaggtgtgctcgcgggcgtccgtaaggccaagcccgacggcttcctcgatcagcaggccttcgaggcccttggggcaggtgaggaagagttcaaaacggtccgacatggggcattccaggcttttcagcaataaatgaacgggcgacgcatcgccggctcggttttcaatcaagcacttttcttgaagagtgctcgcgtggcacgaatgtgccgtcccaccccggctgccgggccttagggcctttagtgacggggcagataaacaattggctgtaacaaaaagaaatattccgacccttcgtcgaataataactgactgcaacgggcggacattctcactaaaggattaaacccatcctctatgcagggtgcatcatagctggctttgcccaataaaaggggcgaaaaaccatcccagcttatggctatagcatcgttatcgttacgtgcttatgacaaaacgatcattgaatccatgtgacctattggttagaactcaacacaggttggcgccgtaacgacgccgacacatcggctcgccacgccggcagcgagcccaccaacggcagaaaaactctgcccggcctcggacgaggccgaaggatatcaagacagtcaacaagtgagggaaacaccctatgagaagacttaagcgtgatccgttggaaagagcatttttacgcggatatcaatatggcgttcatggcaaatcccgtgagctttgcccatttactctaccgtcggtacgccaagcctggatcaacggctggcgagaaggacgcggcgacaactgggacggtatgactggcactgcgggaatccacagactcaacgaacttcacgccgtcggctaatcaagggcaattaattccgacaccacctttggatttgtaacgacttaccatgcacgccccatccgggcggcgggcttcggcccagggggctccttttcaggggccctttttaatgggtcgctttcaggcttttggcaatgctgcgatggcatctaccgactggcgaatcagcgccgggcctttgtagatgaagccggaatacaactgcaccaggcttgcgcccgcggcaatcttctcggccgcatgcttgccttcggtgataccgccgaccgcgatgatcggcaagcgcccggccaactccgcagccagcaccttgacgatatgggtgctcttgtcacgcaccggcgcgcccgacaggccgcccgcttcgtcgccatgggccaggccttcgacacctacgcggctgagggtggtgttggtcgcgatgactgcgtccatccccgagtccaccagggcctgggccaccagcacggtttcctcgtcgctcatgtccggcgcgatcttgatcgccagcggcacgcgcttgccatggcgcacggccaggtcttcctggcgctggcgcaaggcttcgagcagttgcttgagggagtcaccgaattgcaggctgcgcaggcccggggtgttgggcgagctgacgttgaccgtaacatagctggcttgggcgtagaccttgtccaggcagatcaggtaatcgtccacggcgcgctcaaccggcgtatcgaagttcttgccgatattgatgcccaggatgcccttgtatttggcggcctgaacccgcgacagcaagtgatcgacgcccaggttgttgaagcccatgcgattgatgatcgcctcggcttccggcaggcggaagatacgtggcttggggttacccggctgcgggcgcggggtcacggtaccgatttcaacgaaaccgaaacccaactgcgcaaacccatcgatggccgcaccgttcttatccaggccagccgccaggccgaccgggttggggaagtcgagccccatcaccgagacaggcatgtttgccggtgacttgcataccaggccattgagccccaggcggccaccggcaccgatcaggtccagggacagatcgtgggaggtttccggggagagtttgaacaacagctggcgggccagggtatacatgggcgggctagactcggatggcggcgaaaggtgacggcgattatagccggggtcacgggtagcgcgcgaggcgtgaacctcaatcgtcagtggcggtgcgctaccaactgctcgtaatacgcccagattttctgggcatactgcatgcgcaacgcctgacgcgcaggcccggaacccgggcctgcgttgtaggagcctatcgccgtccagttgtagccaaagcgctggatgaactcggcgagaatcgaagcccctacctctaccgacaggcaaggctcattgagcaaccgctcctcggtaatacctcgctcgagcaggcgcggcaaatggctgctgttgatctgcatcaggccgatgtcccgagtaccattacggttcgcactgtttatcgcctgcgcacgaaagcccgactccaccgcagcgatcgcctgcagcagttcgggctcgatgtcgtagcggctggccgcctcctcccagcaataggccagcgcctgattgccggtcatcatcacccccaacaccaagcccttgctccagaacctaaccacgggttaccgctccatggcgggtctggccgcatgccgagcacacatctgccatgcggcccgacacatcgccctcgacctttaccgggcagatgaaccggtaccctcgaccataaatcgtcttgataaaccccttgtcggtggcaaggtacttgcgcagtgagtaaatgcagcgtgtcagcgactcttcggcgacttccccttgcggccaagccagctccagcaagcgatccttggtcatcaacacaccaccggacatcagcaacaatcgcagcaccagcccttccttgggcggcaactgaacatccgcgtcttcaccagtcaggcgaccatcgtcgtgcagggtccaacgcgcaaacaccagggaagtcgtcgtccctccatcatccatgacagccatgattacctcggcatccgactactgacattgaagtcctcatttgcattacgggttcaagtgcccctgtcacgactataaaaacctgcctcagggctcacgctaggacaaagcgcagacatcccgcgttttttggaaccacgctgtaagacgtttctctacccatcagcatcaggtagccatgcgtggtaaacctcgtgcagctcaacccccaaccggtcttccaactgcaccaactcacccaaggccagtaattgcccgttaacccgaacctccacgcaatggattatctccggcatcaacggcaacaccttgccgggcgcaaacgctgccaggcgccggcggctgatcaattgttcctgaagaagaatttccagatgcatcggctaacaccttgttcacggtgagacatcgcgctcaggccgtacaaacgcacgttgaacgcgctcgtattgtgctgctgtcaaaggcggcggccctgcccccccacccggccccagcgcctcgctgcccacggccctggcctgaatcacaaacagacgcacttgatccgggcgagcagccgcccgcccttctgcctctcgttgaaacgcgcccagccacagacgcctgccctggggcacacgcaccacactgttgacccccacctgcgccaccgccgtgtttttttcacgccgacccttctcactcctctggtgcccctcctcaatctcaaggcgcatttcgatctggttagcttcggaaaaacgcggcagtacgctgacctgagtgccatagcgcacaggtttccagtcaattcggtcgtttcccgggggcggtagataaaaggtatggctatcctgaaacaccgccggaacgttctcctgagtgagaatcacgggcagtgtcaccaccttcgcccgtcgacgacgctccaatgcagcgatcctggccatcacgcggttgtcatcccgaggcgcaaagattcgcgtggtcgacgtcttggcgtcttcgtccctgcccaggcccagcttctccagttcagtgcgctccacatccaccagccacagcgacacttcgatcggtcgcttgggtatgtcgagttccgccaccagtttctggatgaaactcacctgggccggcttgcccttgatcagcaggctgttgctgtccgggtaggcgatcacaccaaggctcttgtcggacagcaaccccttgtgctcgctggccagcagggtcttgatcatcgacgccatccccggcacggttaccgggttgtcacgtgtgccgtactgacggtccgccacatcggtgttgagcacttgaaccacaccaaaggcttgcgcgcccacacgcaagtcggctctttgccggtccatcaattgggccaggcgcatcacttggtcgacgtaattcggtgggccggacacatagaaagtgcgcgctccactttcacgcagggggtggcgtgactcatcgaggcccgagcggcgcatgaggccacgcaacttgtcgacggtaatatgccgcaaggtcaccgcagagctctttgcctcgtcggcatcgtagatatgcagcgcttgcccgtcgccgtgccagatcaacccctgttcgagcgcaagcgcttccagcgcctgttgcggcgcatcgaaatccagcgcagtgctgagacgtttgcgcgccaccgcctgactgacaacgatgggcacccccagcggctccgacagcgcagtgaacacggtatacaggctttcatcccgaacctggtgaagctcggccccagccagcgcacttaccagccacagcccggcaaaccacagccaacggtggaaccggaggcggggcatcgttaaaagggattcggcgtgcaccgtgagggttcctgggcagtctggcgttgagaaagcggcaatactgaaagcccgcccggtttcaatcttgatggaaagttgacggccagtcgggcctcaccgcccgtggcatgtgccttgctatgaactctgcatcagagcacgcgccaacggcggagcgcgctacggacaaaggcgtcgttacccgcattggcttacatcgccatctgagggaacgacgctttttttttgaaagaaaaggtaggtgttgatgaacgattcggtcggcaacagcccgatgaacgacccgctggcctgggtcaacggcagtgatgccccggaaaagagcagccttgacctgggtttcatggccctgagcgactgcgcctcgatggtcgtagcggccacccagggcttcgctcaaccctacggcctgaccctgaacctcaagcgccaatcgtcctgggccaacctgcgcgacaaactggtcagcggcgaactggacgccgcccacagcctgtacgggctgatctatgccgtgcacctgggcatcggcggtgtcgcgcccaccgacatggccgtgctgatggggctcaaccagaacggccagagcatcaacctgtcccacggtttgcagcaacaaggggtggtcactcctgaggcactggaccgccacgtgcaccaaagccgaacaaaactgaccttcgcccagacctttcccacaggtactcacgccatgtggctctattactggctggcgagccaaggtattcaccctttgcaggatgtggacagcgtggtggtcccgccgccgcaaatggttgcgcacctgcaagccggacgcatcgacgggttttgtgtcggtgagccctggtgcgccagcgcggtcaagcagaaccaagggtttaccctggcgaccagccaggcgatctggccggatcacccggaaaaagtcctcggctgcacccgtgcgtttgtcgaccagtaccccaataccgcgcgcgtgctggtgatggcgatcctggaggccagccggtttatcgaagaaagcaccgaaaaccgccgctccaccgcgcaattgctcagtggtcgcgagtacctcgacgctccgctcgactgcatcgaaccgcgcctgctgggagcctatgacgatggcctgggcaatcaatggcaggacccccacgccctgcgttttttcgctgatggtgcggtgaacctgccctacttgtccgacggcatgtggttcatgacccagttccggcgttggggcctgttgcgcgaggaccccgactacctcggcgttgcccgccaggtgcagcaactggcgctgtatcgccaggcggcaggtgcgctggggatcccggtgaaaacccaggacatgcgcagcagccaactgatcgacggcaaagtctgggacggttccaaccccaccgagtatgcccgcagcttccgcctgcatgccctggccgatgattccaaccgccaggccttgcgctgacaggagaacctccatgctgcgaatcctgttgatcaatgatactccacgcaaggtcggccgcctcaggacggcgctgatcgaggccggctttgacgtcatcgatgagtcaggcctgaccatcgacctgcccgcacgcgtcgaaacggtgcgcccggacgtgatcctgatcgataccgagtcaccgggccgtgatgtgatggagcaggtggtattggtcagtcgtgaccaaccccggcccatcgtgatgtttaccgacgaacatgacccgaacgtaatgcgccaggcgatcaagtccggcgtcagtgcctacatcgtcgaaggcatccaggcccagcgcctgcagccgatcctcgatgtggccatggcgcgcttcgaaagtgaccaggccttgcgcgcccagctccaggcacgtgaccagcagttggccgagcgtaagcgcatcgagctggccaagggcatgctgatgaaaatgaaggcctgcaacgaagaagaggcctacaccctgatgcgccgccaggccatgagccgccagcaaaagctgatccaggtggcggagcagattatcgccatgagcgagctgctcggctgatctggctcagctcttgctaagtattgcgcacaggtagccaacggcggttgcccctccccgacaaagacgtcgcacacccggtttgccttcgcaaacccggtggcggcgttttttcgttttggccttcttacaagactcccaaccgttgaggtgcgtgatgaaatcaagcttctggaaatccgggcacaccccgaccctgtttgccgcgttcctgtatttcgacctgagcttcatggtctggtacctgctggggccactggcggtgcagattgccgccgacctgcacctgaccacccaacaacgcggcctggtggtggctacaccgatcctggcgggtgcggtgctgcgtttcctgatgggcatgctggcggacaagctgtcgcccaagaccgccgggctgattggccaagtgattgtgatctgtgccctgttcggcgcctggaagctgggcatccacagttacgaacaagcgctgctgctggggctgttcctgggcatggccggtgcatcctttgctgttgcgttgccactggcctcccagtggtatccggcggaacaccaaggcaaagccatggggatcgcgggtgcgggcaactccggcacggtgttcgccgcgttgctggcgcctgtgttggcggccgcctttggctggagcaatgtgttcggcttcgctttgattccgctggtactgacgctgatcgtgtttgcctggctggcgcgcaatgcccctgaacggccaaaagccaaatccatggccgactacttcaaggccctgggcgaccgtgacagctggtggttcatgtttttctacagcgtgaccttcggcggctttatcggcctggcgagtgccctgcccggttacttcaacgaccagtacggcctgagcccggtgaccgccggctactacaccgcggcctgcgtgttcggcggcagcctgatgcgcccactgggcggcgcgctggcggaccgtttcggcgggattcgtacgttgctgggcatgtacagcgtggcggcgatctgcatcgcggcggtgggtttcaacctgccaagctcttatgcggcgctggccctgttcgtctgcaccatgcttggcctgggcgccggtaacggcgcggtgttccaactggtgccgcagcgtttccgccgtgagatcggcgtgatgaccggcctgatcggcatggccggcggcattggcggttttgccctggcggccggtatgggggcgatcaagcaaagcaccggcagctatcagatggcgctgtggctgttcgccagcctgggcgtattggcctggttcggcctgcatggcgtgaaacgtcgctggagaaccacctggggctcggccgccgtgacggcagcgcgggtctgatgagcctgcaactgagcatcgcccaggccaatgccatcggccctcggacggaaaaccaggacgcgctgcgggtggtgacccccgtggccgaactggcagcgagcaaaggctacttgtgcgccatcgccgatggtgtgagccagtgcgccgacggcggcctggccgcccgctcgaccttgcaggcgctggccctggattactacgccacgccgcagacctggagcgtggcccaggctctggagcgtttgctgctggcccagaatcgctggctgcaggccaatggcggtggccagccgttgctgaccaccctgagtgccctggtgtttcgcggccagcgcttcaccctggcgcatgtcggcgattgccgggcgtatcgctggctggatggggaactgcaacgcatcagtgaggatcacgtgtgggagcagccgggcatgcagcatgtactcaagcgtgccctcggcctggatcaacacctggtggtagattttctcgacggccagttgcgcgaaggcgaatgtttcctcctgctcagtgacggtgtgtgggcaaccctgggcgatcacagcatccgttcgattctgcgcgagcaaaccgacctggagctggcagtcaacaccctggtgaacgccgcgcacctggcgggcagccaggacaatgccagtgccctgctcgtccgcgtcgacgcccttggcgcagccaccctcggcgatgccctggtgcagttgcagcagtggccgctgccacccccgctgaaagccgggcaacactttgaaggctggcaggtgcaaagcgtattggcgcaaagccggcagtcattgttgtaccgggtgtgggatgcccagcagcaaccctggctgctgaaaaccctgccgctgagccgcgatgatgacggcgatgccggccaggccttgctcgcggaagaatggtttctacggcgagtcgccggccgggcgtttcctgaagtccatgccgccagcgggcgccagcatctgtactacgtgatgcgggaataccccggccagaccctggccgaactgttccagcagcacggaccattacccctggcgcaatggcagtcgatcgccgagcgcttgctgcgggcggtgggcatgttgcaccggcgacagatcttgcaccgcgatatcaagccggaaaacctgctgctgggggatgatggcgaactgcgtgtgctggatttcggcctggcgtactgcccaggcctgtcggaagaccgcgctcatgcgctgccgggcacgccaagctttatcgcgcccgaggcgttccatggcgaccgccctacggcccagcaggatttatatagtgtcggtgtcagcctctattacctgctgaccgggcactacccctacggtgaaatcgaagccttccaacggcccaggttcaaccagcccgtcagcgccagtcgctaccgccccgatctgccggattggctgcccctgagcctggaacgcgcagtggcggcccaaccggcgcatcgttacgaaactgccgaagaatggttgcgagtgctggaacaggcggaccgacaggaactgagcatccgccccaagcccttgctggagcgtgaacccttgaaggtctggcgcactctggcgctgctttcgttgttgatcaacctggtgctgttgtacgcactctttcaccgctgacgtcatccctggacgaggaacaatttatgaacgcaaaagtctggctggtgggcgcaggccccggtgacccggagctgttgaccctcaaggcggtacgcgccttgcgtgaggccgatgtggtgctgatcgatgacctggccaaccaggcagtactggaacactgcgtcggagcacgggtgatcaccgtgggcaaacgcggtggctgtcgctcgaccccgcaggactttatccatcgcctgatgctgcgctatgcacgccagggcaaatgcgtggtgcggctcaagggcggcgacccgtgtattttcgggcgtggcggtgaggaagccatgtggctgcgtgaaaggggcgtggaggtagagttggtcaacgggatcacggcggggctggcgggcgcgacaaattgtgcggttccgctgacgctgcgcggggtgagtcgtggcgtgaccctggtgacggcgcatacccaggacgacagccgcctgaattggcgagcactggccgagggcgggacaacgctggtggtgtacatgggcgtggcgaagctggaggagattcgccagcaactgctggacggcgggatggcggcggatatgccggtggcgatgatcgaaaacgcatcgctgcctcagcaacgggaatgccgcagtgaactgtcacgaatgtatgcagatgcgcaggcatttgccttgaaaagcccggccatcctggtaattggccatgtcgcagccccaggacaagtcgcttgcctcgctcaagccgccagcgcctgagacaaattacaggcgaaaaaaaagcccggcctgagccgggcttttttctaccactcagtaattactgagcttgagcttcaaccgacgcttctacgcgacggttaacagcacgaccagcttcagttgcgttgtcagcaactgggcgggattcgccgtaacctactgcggtgatacggctaggagcaacgccgtctttaaccaggacttgcttaacagcgtcagcacgacgctgggacagcttctggttgtaagcgtctggacctacggagtcagtgtgaccagcaacttctacgttggtagctgggtactgagccatgaagtcggccaggtttttcacgtcgccgtagctgttaggcttaacaaccgacttgtcgaagtcgaacttaacgtccagctcaacacgtacaacctgagcaactggagcttctggctctggagttggctctggagctggtgctggggtaggagctggagcagctgcgccagcgttaccgccgaagttcacgcccaggccgaccagtgcggagtagtcccacttgccgttgtccagaccgtagtcagcttcaacaccggcacgagcgtacaggttgttggtgaagtagtacttcacgccagtaccaacggtagcgaaggtagtctggtcgcgaccgctgtggccgtcagcctgaacgttggtacggctctggtggccgaaaccgccttctacgtatggacgcaggctgtctacgccagcttgaccgaagtgatactgggcaaccaggctgccggtatcgcctttgatcttctggttaccagtaccgtcgttcgaacgggtgtggttggtcttgtcgtaggacaggttcaaggacaggtcgtcggtcaggaagtaaccgatgcgagcgccaggattgaagccgtcttcgatgtgcttgacgctatcgttgtactgcttcttgtagaacagctcgccttcaactgcgccttggccttgtgccagaacgccgaaagaagtagcggcaataagagaaccaatggccaagcccaaggtgtttttcagtttcatccgttaaatccccatctggtgattgtaaagcagtcccacaaaccgggggacaactcggcgacaagtctaacagaacttgcctacacgtaagagatatttgccacgcactaagtttcagtctcgcccgcaaatttctcacgtaatttatcaagagcacgtttgtaacgcatttttgtagcactcaaacccatgtgcatgatgtcagcgatttcctggaattccagctctgcgacaaatcgtagcaccagaatttcccggtcaatcgggttcacatacaccaaccagcggtcaagtccgcccttctcctcgggtgccggcgccttttcttcagacgcctcctcaagggggtcaagactcaacgcgtccatcaagcgacgcttgcgccgttccttccgatactgcgtgatgcactcgttgtacgtgatgctgtacagccatgtcttgaacttcgatttgccctcgaagttcttcagcccgtacagcaccttgagcatcacttcctgacagacatcgtccgcatctctatcgttccctaaataccttgaacaaacgttgaacagagtgcgttgatatctgcgcatcaattcttcgtacgcgcgagttacgtgaaacagctccgtgtgcgagcgcgcgaccaactcctcatcagagagctcacgggggtcatagcgcgtggacagcgtttgggctttattcaaaacaagtcgtgccgacagtcaggtcaatgtccgccacagcccgatcagccgggttcgcggcggcgtacattagcagggtttgccgggttagcggctactgacctgctgttccaggagaatccgattggacaacgacaccagatcgccgtcatcggtcagcaccgtcgtcttgactgtgccgatctcctcgatttgcccttcgacctcgcccacacgcacctgttgccctacctgatacagctcacgcacatagattcccgcaagaatctggccggcaatttcccggcttcccaagcccatggccagcgcaacggccagaccaacggtaatcaaaacgatcacaatcacatggttgagcaggtcagtcttgacctccaactggctgatcgcgaccgaaatactgatgatgatcaccaggccctgggcaattcgccccaggccggcagcatagtccaaccccacgccttcggcggcgccgcgcaccagcccattggccagttgcgccagcaaaacgcctaccagcagcaccagcgcgccgccgaaaaccttcggcaaatacagcgccagcatgtcgagcgtagctgaaactcgctcaagtccaagggattgagccgcagaaaccaggaaaatcagcaaaacaaaccaataaacgatcttgccgatcaatgtcgagatcggcacttgcagcccggcacgtcccaacagcttggtcaggccggtgcccgccatcaggcggtcgaggcccagtttcgcgagcagtttggacagcagggtgtcgagcagcttggccacgacaaagcccagcagcaccagcaccaaggcaccaaacaggttgggaatgaaattcgccaccttggtccacaatgcggtcatcgcggtgaccaggctctgggtccagagatcaagttccatattcaatcagccttatcagcagtgcgagcaagaggtttacgacgggaaaccggtgagacatgggccgaaccgttgttcagggccatcatcaacgccggcacccagcgcccgagcagaccgaacagatcacccgcgcctacctgacggttggcggttttcagcacgcggcccaggcaggcatcgtcgtcccggttggacggcgaagcattgagcatgtcacgcaaagactgttcgaacggatcgtgcataaggacctctcgcaagtgatttaaaagacgagggttaaattcttggggtcacataggacccttcctacgttcagctcatattcaggtcaaacccagcgtaatcgtcgaaaaagccaccattgtccaagcgccaccgagaccatcaacaggcacgcaatcatgaatccataggggctggcagagaacggaatcccgcccacattgatacccagcaagccggtgagaaaactcatcggcaggaagatcccggtgatgatcccgaagcggtacatggtgcggttcatacgcacgctcaaacgccggtcttcggcctccagcacaagccccacgcgctctcgggtcaattcgagctcttccagataacgggtgaggctgttgttcaattcgttccaatagtcggcatcgtcgtcacagaaccacggcaatttgatgcgcgtgagctgggcaaaaatatcccgctgcggcgccaggaatcgcttgagcccggccgcccgtcgacggatctgcaaaacgctgccatgttccggggtataccgttcgtcggtatcgagtttttcttcctctatgtcgacgatttcggacaggtcggagaccagatcctgcactttattggtgaggtactgagccatataaaggatgagttcagaggcggtcttcggccccttgccgtccgccaattgcaccagcagttcgtcggtggcgcgcaacgggcgcaaccgcagggaaatcacccggctggccgcagcaaagatgcgcaccgagaccatgtcctccggttcagcaccggggttgaggttgacccctcgcaagaacagcagcaattgcgagtccggcagcggcaacaggcgcgggcgggtgttctcctccagcaacaggtcacaggcgaactcgctcaggccactggatttgcgcagccaggtctgggtttgcggatgactgcgatcccaatgcagccacaggctttcctggggctgcagttgcaagtcgtcgagctctgtccgtgcaatcgaacgcgcaccgcctttaccgtccagcaccagggcatgcaccaggccccactgcgcgttttcttcctcgaacatcctcaccccgtcggttattgcagtttattcaggcattttcagcgggctgggcgacacgatcacgccgttgttgtcggcatagatgtactcgcccggacggaacgtcaccccggcaaaggtgaccaccacgttcaagtcgccgatgccacgcttgtcggtcttcatcgggtggctggccagggcctgcacgcccaggtcggtctgggcaatgacgtcgacatcgcggatgcagccgtagatcaccagcccttcccagccgtttctcgcggccttctcggcgatcatgtcacccagcagcgcacggcgcagggaaccgccaccgtcaaccaccagcaccttgccggcgccaggctggtctgcctgttccttgaccagagagttatcttcgaagcatttgatggtgacaatctcgccaccgaaggaatctcggccgccgaagttgctgaacatcggctcaagcacctgcaccagctccgggtacgcgtcgcacaggtcgggggtcacgtaatggttcattgaacaattcctttccgtcaaagaagcgtctttcaaaagaagcgccagcccaagcaggtgcgaaacatcccatccacttcgccgcaacgcaatagccactgcgcgactgaatatgaccagaagcgtttaacgcgtcatatcttagccgcaaccacacacgagtgaaacgcccttggcagagccctgccctcaacccgtggccagcacctcgggctgcacgccgaacaagggtgtgagcgggtcgttcagccattgcaccaccagcggccacacttcggcctgggcagctttgctgacgagcatttcaacgtgcccgaaatcttcggtaaacccttgctggcggcccaggcacaggtattgacggtgctcggagccgacctgctcgaacagcttgcgacacgcccagtcagggtcctgatggtcgccggcggcactgaccgccaacaacggcacatccacgtctgccaggcctttccaccagtcgttcttgccttcgccaaagcggccaaacaggccgttccagcgcatggcttcgatcatcacacctgccggctcgtcctccgggccacgcttgaggcgcgagccagacacttcgccgaagcgtttcaagagcaagcgccccgtccactccaccggtggcagtttcaacggccagtgggtgcggctgacctggcagccaaacaacgctacagaagccacggctggcgcgccaaggtgcttcccgccaagcgctgcagccaggctggtgccgcccagggaatggccgatccagtggggaacctgcccgctttgctcgcgcacaaacgcgccaatggccggcaagtcgtagcgcgcatagtcagcgacgcggttgcgtgcgtagtcatgattgcgcttggacaaaccatgaccacgcatttccgggatccacacatcaaacccctgacgggccaggtaagcccccaggccgatgcctttgggcgaataccagaagcgccgattggaaaaactgccatgcaataaaataaccgcaatgccccggttttccgggacatcggccaggcccagacgggtaaccgccagctcgacggtgccgtcggggctgttaccgggtttgaggcggtaaacatcttcactcaggtcgccacgacgttcagcgctgatcagggcgacgggaaacagtttgctgctgctttgcataatgctcttgcacaaaaaagggcggcgtccggaaggagttccgccctgcacagataagaatgccggtcacccttatcgggtgaccggcacttttgacatgacgatcttaggcggacgcttggccttccgccaggaagaaccaggtttccagcacggaatcggggttcaacgagacactttcgatgccctgttccatcagccatttggccaggtcaggatggtcggaagggccttggccgcagatgccgatgtacttgccggccttgttacaggcctggatggcattggccagcagcttcttgaccgcagggtttcgctcgtcgaacaggtgggcgatgatcccggaatcgcggtccaggcccagggtcagctgggtcaggtcgttggagccgatggagaaaccgtcgaagaactccaggaactcttcggccaggatggcgttggacggcaattcgcacatcatgatcacgcgcaggccgttttcgccacgggacaggccgttttccgccagcaagtccaccacctggctcgcttcgcccagggtgcgcacgaacggcaccatgatctcgacgttggtcaggcccatctcgttgcgcacgcgtttgagggcgcggcattcgagttcgaagcaatcacggaacgcttcgctgatgtaacgcgaggcgccacggaagcccaacatcgggttttcttcttccggctcgtagagcttgccaccgatcaggttggcgtattcgttggacttgaagtccgacagacgcacgatgacctttttcgggtagaacgccgccgccagggtgctgatgccttccactagcttctcgacatagaagcccaccgggtcgttgtagccggcgatgcgcttgtcgacgctttccttgatgtccagcggcaggccgtcatagttcaacagggccttggggtgcacgccgatcatgcggttgatgatgaactccagccgggccaggcccacaccggcattcggcaattgcgcgaagtcgaaggcacggtcagggttgccgacgttcatcatgatcttgaacggcaggtccggcatggcgtcgatggagttctgcttgatgtcgaagcccagttcaccttcgaagatgaaaccggtgtcgccttcggcgcaggacacggtcacgccctggccgtccttgagcagttgggtggcgttgccgcaaccgactaccgcagggatccccagttcacgggcgatgatcgccgcgtggcaggtacgcccgccacggttggtgacgatggcgctggcgcgtttcatcaccggttcccagtccgggtcggtcatgtcggagaccagtacgtcacctggctggaccttgtccatctcggacacgtccttgatgatccgcaccttgccggcgccgatgcgctggccgatggcacggccttccaccagcacggtgccggtttctttgagcaggtagcgctccatgacattggccgacgtgcggcttttcacggtttccggacgggcttgcacgatgtacaacttgccgtcgtcaccgtccttggcccactcgatgtccatcgggcacttgtagtgcttttcgatgatcatcgcttgcttggccaactcgctgacttcagcgtcggtcaggcagaaacgcgcgcgttcggccttgtcgacttcaacggttttcaccgaacgaccggccttggcctcgtcgccgtagatcatcttgatagccttgctgcccaggttacggcgcaggatggccgggcggcccgcttcaagggtgcccttgtgtacgtagaattcgtcgggattgaccgcgccctgtacgacggtttcacccaggccgtaggcgccggtgatgaacaccacgtcacggaagcccgattcggtatcgagggtgaacatcacgccggcagtgccggtttccgaacgcaccatgcgctgcacaccggcagacaaggccaccagcttgtggtcgaaaccctggtgcacacggtaggaaatcgcgcgatcgttgaacagcgaggcgaacacttccttggctgcgcggatgacgttttccacgccgcgaatattcaggaaggtctcttgctggccggcgaaggaggcgtccggcaggtcttcggcggtggccgaggagcgcacggcgacggccatgtccgggttgccggccgacagggtggcgaaggcggtacggatctcttcgttgagcttctcggggaactcggcttccatgatccattggcggatctgggcgccggtcttggccagggcattgacgtcatcgacgtccagggcgtccagcgcggcgtggatctgagcgttgaggccgctcagttcgaggaaatcgcggtaagcctgggccgtggtggcgaaaccaccgggcaccgacacacctgcgcctgcaagattactgatcatctcgccgagggatgcgttcttgccccccacgtgctctacatcatggacgccgagcttatcgagggaaactacgtactctaccaaggtgatctctccactttctgtgttggaaaagctcaggacgccggctgctcagtaggagcattcgccagcgcttgtggcctggacctggaaaataagtgagaatgcggcccactgcgggacggcaaaatcgcgcctatcatatccaagattcgccatcagcttaaggcccagggctcaaatgaaacgatctgctttctttatctccgacggcaccggcatcacagccgaaacactgggtcaaagcctgctcgcgcagttcgaaaacattaccttcgccaaattcacgcggccgtacatcgacagcgtggataaagcgcgggccatggtacaacaaatcaatctggcggctgaaaaagacgggttccgcccgatcattttcgacaccatcgtcaatcaagacatccgtgagattctcgcaacgtcgaatggtttcatgatcgatattttctcgaccttcctggcgccattggagcaggagttgagtgaacactcctcctattcggtcggaaagtcccattccattgggcacaactccaactatatggagcgtatcgaggcggtgaacttcgccctcgacaacgacgacggcgcccgtacgcactactatgacaaggccgacctgatcctggtcggcgtgtcgcgctgcggcaaaacgcccacctgcctgtacatggccatgcagttcgggattcgcgcggccaattacccgctgaccgaagacgacatggagcacctgacgctgccggcggccctgcgcgcgcattcgcacaagctgttcgggctgaccatcgatccggaccgcctcaccgcaatccgcaatgagcgcaagcccaacagtcgctattcgagctatgcccagtgtgagtttgaagtgcgcgaagtagaaaatctgttccgccgggagaatattgcgcacatcaattccacgcatttctcggtggaagagatttccgcgaagattctggtggagaaaggcgtggagcgcaggttcaagtaagggtggcgcctggactggcctcttcgcgggcaagcccgctcccacagttgaccgagttccagctctggaatgcggtcaaaatgtgggagctggcttgcctgcgaagaacgataacgcggtgaacctgcctacagctgaaaccttcctcccccctgccccagcgccgtggccagcgcatcaaaccccgcccgcaacagctgatcatcccccgaggtgttgcagatactcgcccggatgaactgcggcaccgccgtctgccccacggcaaacgcctcggcggtggcgatcaggtaattattctgcttgagctcggcctcgatctccgacgcccgccatggctccggcacttctatccagaagtgcgggctgttgagatgggtgcggtattccaggcccgccagcaggtcgcggaccagcgccttgcggcggctgatctcgttgatctgctggcgcagcaggtattccgccgtgccgttctcgatccactgggtcgccagctcgagggtgacgggcgtggccatccagcaggtcgaacgcagggccgccgaaatacggctgaccagtgcgggcggcgcatgcacatagcccacacgcagcccggcggacaccgccttgctcaggctgctgatcaaaatcgtacgctcaggggcgaaatggctgaggggcggcggccgatcctccaccagtacaccgtgggcttcgtcctcaagaatcagcagattgtgttcgcgacagactttgaccaacgcttcgcgacgcgccaccgagagcacagcggtggtggggttctggatggtgggcgtgcagtacagcgctgaaatccggtgattacgacagacttcgtcaagcgcgctcggcagcacgccttcttcgtccatctccagaccgatcagccggatacccagcatgcgcgcggcggtgatcaggccgggataagtcagctgttcagtgaccaccgtatcgccagcccgcaacagtgccatcatcgagcagagcaagccgtgctggccgccgttgacgcagatgacctgctcggggatcggatgaaaatcgcgctgcaccagccattgcgcaccggcttcacggtagcgcggcaagccggcgtctggcgtgtaggcactgatgtcctggaggaacttggcgttggtcgacagggtttggaagctctgggccaggaacaccgtctcctgccccgggatgtgcatattccggctcatgtcgaagtattggcgcggttcttcgctgaagttgcgaaagccttcatcgcgctggcgctccatcccacgcttgcgcacgaaggtaccgtcccccacccgcgccaccaccaggcccaggcgttccagttcgccgtaggcacggctgatggtgccgatcgtgacgccaagattgtcggaaagtacccgatggggcggcagttttcttcctggctcaatcaagccttcaaggatgccccgttccatgacatcggacagtcgcttgtacttcacgccctgaccgttggacaacccctcacgcataattgacaccatgtcaatatttgttttgacagccatctttcgccctaatagtgtgcttttacgggttcaatcgccgaattttacaactcattacaagctcaatatagagttcaattccggctcagggaagcaataaacgatgccaatgtccgccgttctcgaaaacaccgccaagaccaaaacccaaaaacagtggctggccgggctgatcaccagtgtgatgttcctgatcgtgtgcctgagttggggcaccacctggctgggtatcaagattgccgtggagagcgtgccgccgctgacctccgccggcctgcgcttcctcatcgccttcccgctgttcctgtgttttgccatggtgcgccgcgaaccgatcctgtttccccgcgagagtcgctggttcttcgtgttcgtgaccctgtcctacttcagcgtgccctactacctgctcaactacggcgagatgcatgtctcgtccggcctcaccgcgctgctgttcagttgcatgccggtgttcatcctgattttctccgcgctgttcctgcgcgaacgcatctacttttcccaggtggtcggtatcggtatcggcttcggcagcctctacatgatcatcaagagccagggcctgcacctggaccacgccgagttcttcggggtactggcgattctgaccgccgcgatcatgcatgccttgtgctacgtcatcaccaagcagaaaggcagcgccatcagcgtaatcacctacaacaccctgcccatcggtattgccgggctgatgctgttcgtcgccgggctgtggtttgaagcgccgaccttcgaagccatcaccctacggtcgtggggtgcgctgttctacctggggctggtggcctcggtgggtgggttcatcgtgtatttcatgctgctcaagcgcttgagcccgatcatcctgtcgttcgtgtttatcatcttcccggtgttcgcggtgatcatcggcgcctggtacgaaggcgtgtcgatttcccgcgacctgatgctctactcggccatcctgctggccggctttgcgatcaccaagttgccggttgaaaaactcttggccaagaaaaattgaccctcctaccaccacgcgagagaaacatggacgtcctccgccccgaagccctggaacagatctacgcccacgccagccgcagctaccccgaggagtgctgtggttttgtcttcgccgacggcagcgtgtacctgggcagcaatatccagaacgagctgcaccgcaagaaccccgagatgtacccgcgcagcgccgccaacggctacacattctcggtggccgacaccctgctgctgagcaaggcgtttcgcagcgacaacccggtggtggtgatctatcactcccacccggatgtcggcgcctatttcagcgacgaagacgaggacaaggcgctgttcatgggtgaaccgatctaccccgtcagctacctggtggtcgacgttcgccagggccaggccctcggttccaagctgtttgcctgggatggcaagcatttcgcccttcaacctttcaacgacctgcacacggagttgtccatgaacgctgtctctttccccgacattctggttcgcgtggccaagctgccggaatcgaccctcgagggcgccggaacgacattgcgcgaagtcattgaaaacctctgcagcagccacccgcagttacgtccccacctgttccacgagaagaacaaccagctcaaggaacacttcctgtttaccgccgaggaagagttagtgggcgccgacgacccactaccggaaaaagcccggatcgaagtgctgctcgccacgtcgggcggcatggatgtcgacgcactgagcaatgaagaagtccagcgctacgtgcgccacatcaccctgcccggcgtcggccgcgaaggccagttgaacctcaagaaagccaaggtgctgatcatcggcaccggtggcctgggctcaccgatcagcctgtacctggcagcagccggcgtcggcaccctggggctggtggacttcgatgtggtggaaagcagcaacctgcaacgccagatcgtccacggcaacagcacgctgggcatgcccaaggtcgagtccgccaagcaacgtctgcaagaactcaaccgtcatatccagatcaatgcccacgacaccgccctgaatgccgataacgccctggaactggtgggcgcatacgacctggtgatcgacggcaccgacaatttcgacacccgctacctggtcaacgacgcctgcgtgcagctgggcaagccgttggtatacggcgccatctaccgcttcgacgggcagatcagcgtgctcaactataaaggtgggccctgctaccgctgcctgttccccagcgcgccgcccgccgaactggcgcccaattgcagcgccggtggcgtgatcggcgtgttgcccggtgtggtcgggatgatccaggccaccgaggccatcaagctgttgatcggcattggcgaaccgctgtctggccgcttgatgcgcttcgatgcgctggcgatgaagttcagcgagatccgcttcaagcgccgtgccgactgcccgtgctgctccgaactgcgccataacgaaagcgtggcaccggctgtctgtgcagacgccatgcccagccgaccgtccctggccgaggagcgctacataaagccccgtgtactcaagcaattgctcgaacacccgcgcagcgtcgatgtgttgctggacgtgcgtgatgccagcgaactggaggtatgcaaattgccaggtgtggtgcatatccccctggccgaactggacgatcagctcgaccgcctcagccgggacaacacccactacctgatctgctacgccggcacccgcgccgagcaagccgccagtaccttgctggcggcgggtttcgccaataccaaagtcctgcagggcggcatgaagcattgggttcgcgacgtcgaacccgacatgcccttgtattgagccgaggactgaatgatgttgcacaactcgattctcgaggtgatcggccaaacgccgatcgtgcgcctggcgcagttctccgaagacctcggcatcgaggtctacgccaagctcgaatccctcaacccgggcggcagccacaaggcgcgcatcgccctgggcatgatcctcgacgccgaacgccggggcgtgctgatccgtgactccgggcaaaccatcatcgagcccagcggcggcaataccggtatcggcctggtcatggccggcaatgtgctgggctacaaggtcgtgctggtgatccccgacaactacagccccgaaaaacagaagctgctgcgcctgtacggggccaaggtggtgctgtcggacagccgcctgggcaacaactcccacggcgaaaagtgcatggaattgcagctggaaaaccccagctacgtgatgctcaaccagcaacgcaacggcgccaacccacagacccatcgcgacaccaccgcaccggaaatcctgcgtgcgttcggcgagcgtcgcgccgactactttgtcagcggaatcggcaccggtgggcatatcaccgggattggcgaaaccttgaaagccgcctggccggggctgcgcgtcatgggggtggagccggaagaatgcgacctgctgaaaaaccagcatgcgccgcaccatatccagggcctgtcgatcggcctgatcccgagcatcctcaacctggacgtgatcgacggcatgctcaaggtctcgcgccaggactgcatcgacatgatgaaacgcatcatgcgcacggatgccatcagcctgggcttgtcttcggctgccaacatggtggccgtcgcccaactcgccccggaactgccgcccgaaacggtggtgctgaccatggtctacgacaatgccgacagctacctgcccagtttcgaataaacggtcttccaaccaatcagacgacgggggtgcctcaatgggtggctttatcgacatgcaacagttgcacgatgagttgctgactcacctcatcaagacgctcacgccggcacagatgaaacagctggagccgcatctggcgccgctggtacagaatgccgcccaggcggtggccgaggatttgatcgcctacgcctaccgcgacccggcatcccgtgggcgcggtgagctgatcctggagtcctacgcgtcgttcaaggcggtgctgtattaccggctggcgcacctggtgtggcatttccccgaccgcaccaacggcgtcttctcgcgtatcgccctcaagctgagcaaccagggcaaggtgctttccggcgccgagatccacccggcggcgcgcattggtcggcgctttgtactggatcacggctacggcaccgtgatcggcgaaacgtgtgagatcggcaacgactgctacatcctctgcggcgtgaccctgggcgcccgtggcatcgccaacaaccccgacggcaagcgccacccacgcctgggcaataacgtcgaggttggttccggcgcccgcgtgctcggctatgtactgatcggcgacaacgtgtttatcagtccctcctgtgtgatcacccaggatgtgcccgccggcaccaaagtgaaggtggtgaaccagatccaactgcaaaaaaacgacgagtcggaccacagcaattacctcggcgccttcgccctggatgagcgtctgcacgtggtcggcgagatcaatgcgagccacaaggtcacggtgctggacgccgacttccatcccttgcccgggctgatgctggagcccacggtgaaggagcgtcaccacctgcaatttcgcctgcaccgcatcgagtcgggcaaccccctgccacgcctgccgctgaacctgaaggtctgcggcccggaatttgaaatcaccctgctttccccgcctggcttgagtgcgatggtgcgttccctgttgcaagccagtccattgatcgttggaggttgaacatgtccgtgcacaccatggaaaccctggcgctgttcgacagcgcgccctaccagaacgccttcagcgcccgggtgattgccgtcagcgaacacggcgtcgccctggaacacacgttgttctaccccaccgggggcgggcagccaggcgacacggggcacctcaccctggcggacggtacgcgggtcgaagtgaccggcacagtgcgcgacccggtgcagcgctcgatcatctggcaccaggtggaacactgccccgagcaattgaccgccggagtgcaggtggacgccggcctcgactgggaccggcgctaccagcacatgaagatgcacacctgcctgcacctgttgtgctcgatcatcgacgcgccggtcaccggatgcagcatcagcgcagacaaaggccgcctggatttcgacctgccggaaatgaccctcgacaaagacagcatcacccgcgacctcaatgcgctgatcgaacaggcccacccggtgaaaaccctgtcgatgccggccaccgagtacgccaccctgctgcagatcacccgcacccaggcggtggcaccgccggtgattcagggtgcggtgcgggtgattgaaatcgccggcatcgatatccaaccgtgcggcggcacccatgtgctcaacaccgaagaaatcagccgggtgttctgcgagaagatcgagaagaagagcaaacacaaccgcagagtcatactgcgattcgagtgaacacggtgaactgtgggagccccccctcccacattcattgggtttccacagataaatacagggtgtctgctagatcacgaaaagatcaacaaaccggtttaccggcgttgcctcaagccgcgcctgatctttgcacaacgcaaaaatctcggcgctgcgctgcgcggtaaaccgtgtgaccaggttggccttgaacttgtcttccaataacggaatgccatccacccggcgacggcgatggccgatcgggtactccaccgccacctgctcggtgctgctcccatccttgaagaacacctgcaccgcgttggcgatggaacgcttgtcagcctccaggtattcgcggctgtagcgtgggtcttcgacgatgaccattttgtcccgcagcgcgtcgatgatcggatgggcggcgtggaattcgtcttcgtactgctccgccaccagattgccgaacgccaacggcacggcggtcatgtattgcaggcaatggtcacggtccgcggcgttggccagttggccgaccttggaaatgatgcgaatcgccgactcatgggtggtgatcacgatacgttcgatttcctgcaggcgatccttgaccaatggatgcaaggtcaccgccgcttcgcaggctgtttgcgcgtggaactcggcggggaagctgatcttgaacagcacgttttccatcacataggtgccgtagggctgggacaggctgaacccgcgcttgtcctgcggcttgagcgccaggtccttgttggtgtggctgaacaatacgtcgtagaacccccactgcggtgcgcttaatacaccggggatgcccatttcgccgcgcatcgcgatatccgccaggcgcacaccccggctggaggcatcacccgccgcccaggatttgcgcgaaccggcattcggcgcatgccggtacgtacgcaacgcctgcccatcgacaaaggcgtgggacaaggccgcgagcagttgctcacggttggcgcccatcagcttggcggtcaccgccgtggaggcgacttttaccagcagcacatggtcgaggccgacacggttgaacgagttttccagggcaatcacgccttggatttcgtgggccatgatcatcgcttccagcaccgcgcgcagggtcagcggtgtgtcaccgttggccacgcgcttttgcgacaggtggtcggccacggcgagaatgccgccgaggttgtccgacgggtggccccactcggcggcgagccaggtatcgttgtagtcgagccaacgtacgatgcagccgatgtcccacgccgccttgaccggatccagccggaacgaagtgcccggtacacgagcgccgaacggcaccaccgtgccctcgaccaccggccccaggtgcttggtgcactccgggaaacgcagggccagcaggccgcagcccagcgtgtccatcaggcagttgcgggcggtgtccaatgcggcctgggaatcgatccggtaagtgaggacatagtcggcgatgtcctgcaggacctggtcgtactcgggacggttgttctggtcgacgttggcgctcatggcagtactccaaaaaggggttggggtcagtcctcgggctcacggttattgagggcagatctaaggtgtccgccttggaataaagatcacctgtgggagggggcttgcccccgatggcagtggatcggtggatgaatctgtcgactggaacaccgctatcgggggcaagccccctcccacattggatagaggaggacctttagaaagcatcgccggggatgcgtacgaagccttccatcagtactcgggcgctgcggctcatgatggctttttttaccacccattcgccctccacctgggtggcttcagcgccgacgcgcaaggtaccggacggatgcccgaagcgcaccgcgttgcgctcaataccgcccgccgccaagttgaccaacgtcccggaaatcgccgccgccgtgccgattgccaccgccgccgtgcccatcatcgcgtggtgcaacttgcccatggacagcgcacgcaccagcaggtccacatcacccgccttgatcgccttgccactggacgccacgtagtcggccggcttggccacaaacgccaccttcggcgtgtgttggcgttgggcggcttcgtccaggtgctggatcaggcccatgcgcaacgcgccataagcccgcacggtctcgaacattgccagggctttcgggtcgctgttgatcgcgccttgcaactcggtgccggtgtagccgaggtcttcggcgttgataaagatggtcgggataccggcgttgatcagcgttgccttgaaggtgccgacgccaggcacttccaggtcgtccaccaggttgccggtggggaacatcgacccgccgccgccctcttcatccgctgccgggtccatgaattccaactgcacttcggcagccggaaaggtcacgccgtcgagttcgaagtcaccggtttcctgcacggcgccgtcagtgatcggcacatgggcgatgatggtcttgccgatattggcctgccatacacgcaccacagccacgccgttgtgggggacgcgggccgggtcgaccaggccggcgctgatggcaaaggaaccgaccgccgccgacaggttgccgcagttgccgctccaatcaacgaagggtttgtcgatggagacctggccgaacaggtaatccacgtcatgatcggcgcgagtgcttttggccaggatcacggttttgctggtgctcgaggtggcgccgcccatgccgtcgatttgcttgtcgtaggggtcggggctgccgattacccgtaacagcaaggcgtcacgcgcagcccccggcacctgcgccggttcgggcaggtccgtgaggctgaaaaacacacccttgctggtgccgccacgcatgtaggtggcagggatcttgatttgcgctacgtgtgccatggtgtcctctcaggctgtcgccgccgattccaggaagtcctgggcaaaacgctgcaacacgccgcccgcctcgtagatcgacacttcttcggcggtgtcgaggcggcaggtcaccggtacctcgacacgttcgccattcttgcggttgatcaccagggtcaactgcgcgcgtggagtgcgagcaccgaccacgtcataggtctcgctgccatcgatcttcagggtgtggcggtcggtgcccggcaggaactccagcggcagcacgcccatgcccaccaggttggtgcgatggatgcgctcgaacccttcggcggcaatcgcctccacaccggccaggcgcacgcccttggccgcccagtcgcgggacgagccctggccgtagtcggcgccggcaatgatgatcagcggctgcttacgctccatgtaggtctcgatggcttcccacatccgcgtgacctggccttccggctcgatgcgcgccagggaaccctgcttgaccttgccgttttccaccaccatttcgttgaacagtttcgggttggcgaaggttgcgcgctgcgcggtcaagtggtcgccacggtgggtcgcgtaggagttgaagtcgacttccggcaggcccattttcgccaggtattcgccggcggcgctgtcgagcatgatcgcgttggacggcgacaagtggtcggtggtgatgttgtccggcagcaccgccaatgggcgcatgcccttgagcggacgcgccccggccagcgcaccttcccagtacggcgggcgacggatataggtgctctgcgggcgccagtcgtacagcggcgcgactttcgggccggtgtcttcgtggatggcgaacatcgggatgtagacctggcggaactgctccggcttgaccgaggccttgaccactgcgtcgatctcttcgtcgctcggccagatgtcctgcaggcggatttccttgccgttggcgtcgaggccgagcacgtctttttcgatgtcgaagcggatggtgccggcaatcgcgtacgccaccaccagcggtggcgacgcgaggaatgcttgcttggcgtaggggtggattcgcccgtcgaagttgcggttgcccgacagcacagcggtggcgtacaggtcgcggtcgatgatttcctgctggatcaccgggtcgagtgcgccggacatgccgttgcaggtggtgcaggcaaacgccaccacaccgaaaccgagcttctccagctcatggcccaggcccgcttcttccaggtacatcgccacggttttcgagcccggcgccagggacgatttgacccacggcttgcgcgtcagacccaacttgttggcgttgcgcgccagcaggccggcggcgatcacgttgcgcgggttgctggtgttggtgcaactagtgatagcagcgatgatcaccgcgccgtcgggcatttgccccggcacttcatcccactggccggaaatacccttggacgccagatcgcgggtggcaacgcgagcatgcgggttgctcggcccggccatgttgcgcacgacgctggacagatcgaaggtcagcccacgctcgtactgcgcgcccttgaggtcatcggcccacagaccggtgtggcgagcatattgctccaccagggtgacttgctcgtcttcacggccggtgagtttcaggtaggcgatggtctgctggtcgatgtagaacatcgccgcggtcgcgccgtattccggggccatgttggagatggttgcacggtcgccaagggtcagtgccgaggcgccttcgccgaagaactccagccaggcgccgaccaccttctgttgacgcaggaactcggtcagcgccagcaccatgtcggtggcggtgatgccgggttgcagcttgcccgtcagttcaacgccgacgctttccggcaggcgcatccacgaggcgcgaccgagcatcacgctctcagcttccaggccgccgacaccgatggcgatcacgcccagggcatccacgtggggtgtgtggctgtcggtgccaacgcaggtatcggggaaagccacgccgtcgcgcacctggatcaccggggacattttctccaggttgatctggtgcatgatgccgttgccgggcgggatcacgtcgacgttcttgaaggccttcttggtccactcgatgaagtggaaacggtcttcgttgcgacggtcttcgatggcgcggtttttctcgaatgcgtccgggtcgaaaccgccggcttcgacggccagggagtggtcgacgatcagttgggtcggcaccaccgggttgacctgcgccgggtcaccgccttgcagggcgatggcatcacgcaggccggcgaggtcgaccagggcggtctggccgaggatgtcgtggcagacgacgcgggccgggaaccatgggaaatcgaggtcacgcttgcgttcgatcaactggctcagggatgcattgagggtggccgggtcacaacggcgcacgaggttttccgcaagcacgcgggaggtgtacggcaaggtggcgtaggcaccgggggtaattgcctcgacagccgcgcgggcgtcgaagaaatccaggcggctgccggggagcggtttgcgaaattcagtgttcatcgtcaggactcggtcacggtgataacaaagggaggacctgcaccgatccagaattgaaatgcggtcaaaatgtgggagggggcttgcccccgatagcggtgggtctgtgccagttgcatcaactgacagactgcaatcgggggcaagccccctcccacatttgatccggttaacatttcaggatcgtcggcattcccattcagcgacgttcgattggcacgaacttgcgctgctcaacgccggtgtattcggcgcttggacggatgatgcggttgttggcgcgctgttcgaacacatgcgccgcccagccagtcaggcgcgagcacacgaagatcggggtgaacagcttggtcgggatgcccatgaagtggtacgccgaggcatggtagaagtcggcgttggggaacagcttcttctgctcccacatggtcttgtcgatggcttcggagaccgggaacagcaccttgtcgcccacctcgtccgcaagttttttcgaccagcccttgatcacttcattacgcgggtcgctgtctttgtagatcgcgtggccgaagcccatgatcttgtccttgcgcgccagcatgccgagggtgccttcgaccgcttcttcagccgacgagaaacgctcgatcatctccatcgccgcctcgttggcgccgccgtgcagcgggccgcgcagcgagccgatggcggcggtgacgcaggaatacaggtcggacagggtcgaggcacacacccgggcggtgaacgtcgaggcgttgaattcgtgttccgcgtagaggatcagcgacacgttcatcaccttgacgtgcaactcgctgggcttcttgccgtgcagcaggtgcaggaagtggccgccgatgctcggctcgtcggtcacgcagtcgatgcgcttgccgtcgtggctgaagcggtaccagtagcacatgattgccgggaacgcggcgagcaggcggtcggtaacgtcgcgctgcacgctgaagtctttttccggctcgatattgcccaggaacgagcaaccggtgcgcatcacgtccatcgggtgggcgtcggcggggatacgctccaacacttccttcagcgcttgcggcaggtcgcgcagcttgcccagcctggcgctgtaggcggccagctcggtcttggtcggcaactcgccgtacagcagcaggtaggcgacttcttcaaattgcgcatcggcggccagttcgcgcacgtcgtagccgcgataggtcaggccggcacccgcctggcccacggtggacagtgcggtctgcccagccacctggccacgcaggccggccccactcaatacttttgcttcagccatgtctgttctccaatcttgaatttatttgggagtgcgccgggttattttttcgcggcaaacagcgcatcgagcttctgctcgaaggtgtggtagtcgatgcgatcgtaaagctccatgcgggtctgcatggtgtcgatcacgttctgttgggtaccgtcgcgacggatcgcggtgtagacattctcggcggccttgttcatggcgcggaaggccgagagcgggtacagcacgatggaaacatcggcagatttcaactgttcggtggtgtacagcggcgtggcgccgaactcggtgatgttggccaggatcggtgctttcacacgagaggcgaacagcttgtacatgtccagttcggtgatggcttccgggaagaccatgtcggcgccggcctcgatgcaggcggcggcacgttccagcgcggattccaggccttcgaccgccagcgcatcggtacgcgccatgatcacgaagctgtcatcggtgcgcgcatccacggcggccttgatacggtcgaccatttcctgctgggacacgatttccttgttcgggcgatgaccgcaacgcttggcgccgacctgatcttcgatatggatggcggccgcgccgaacttgatcatcgacttgacggtgcgcgccacattgaatgccgaggagccgaagccggtgtccacgtccaccagcagcggcaggtcgcacacgtcggtgatgcggcgtacgtcggtcagcacatcgtccaggccggtgatgcccaggtccggcacaccgagggagccagccgccaccccgccacccgacaggtagatcgccttgaacccggcgcgcttggccagcagtgcgtggttggcgttgatcgcacccaccacctgcagcgggtgttcactggcgaccgcgtcacggaaacgctggcctggagtcatcttgttattggaactcatcattcacctcgtgattggggagtgccgtccgggaagtgacgggcaatgttgcgtttggatgcgccgatatgccggcgcatcaacagttcggccagttcaccgtcgcgatcggcaatcgcgtcaagaatgcggtggtgctcggcaaaggcctggcgtggacgattgggggtggcggaaaactggatgcggtacatgcgcaccaattggtacagctcgccgcagagcatctgggtcagggtgcggttgccggcgccttggatgatccggtaatggaagtcgaagtcgccctcctgctggtaatagccgaggccggcctggaaggcttcgtcgcgctcgtgggtgtgcagcacctggcgcagttcttcgatttccgcgtcggtcatgcgctcggcggccaggcgacaggccatgccttcgagggattcgcggatttcgtagagttcgatcagttcgtcgtggctcagcgacaccacccgggcgccaacgtggggcacgcgcaccagcaggcgctggccttccaggcggtggatcgcctcacgcagcgggccacggctgatgccgtaggtgcgcgccagctctggctcggagatcttgctgccgggcgcgatctcccccttgacgatggcggcctggatacgccggaagacgttctcggacatggtctgggaatcgtcttgcgccaccactggggattccagctgatccagcatattgtcgacacctttaaaagcaatgccgcaaaaactagccaatcagcccaggatagtcaaagaataaatccatattgtcgacaatcgtctaataaccagggttgcacccaataggggcatggccgcctgccagcgctggcgccaaaaaagcatcatgttagaatgcccggcacttttgcctgacatcattggatgaaacggcgtacgagggagtttgcgcagcaatgccagtcgccttgaattgaacatcgcactgccgcctcgggatctatgagactcaaacccttccttctattaatgtgcctgttaaccgcacccggcctcggcgctgccgccgagaagaccgtctatggcctcaacgaatacgcccaactggccggtatcgacctggaagtcgcggccaaactggataccggggccaagaccgcctcgctcagtgcccgtgatatcaagcgcttcaagcgcaacggtgaatcctgggtgcgcttctacctggccatcgacaccgcccactcccaccccattgagcgtcccctggcccgcgtcagcaagatcaagcgccgcgccggtgactacgaccccgatgaggacaagaactacaccgcccgtccggtgattgccctggatatctgcatgggcaccgctttacgcagcatcgaagtgaacttgactgaccgcagcgctttccaatacccgctgctgatcggctccgaagcgctgaaacgctttgatgcgctggtcgaccccagtcttaaatacgcagcaggcaaacccgcctgcgccgccgacgctcataccgccgagtaaaccgaatgcgctctctgaccctgcacctgaagatcctgatcaccatcctggtggtcctgggtatttcggtcaccgcttatcagatcttcgtgctggggatccccgtcaccgaggacgccaccgacgacttgtggaacatcgacgccaaggtcgaattcgtcgccaacccgaaagacccggtgaagatccagatgttcgtgccgcccttgagccgcgacttcgtcagcctcaacgaaagcttcatctcgaataactatggggtaagcgtcaaccgcatcgacggcaaccgtaaggtcacctggtcggcccgccgtgccaagggcaaccagaccctgtattaccgcctggtgctgaccaagcgctacagcggcgaaaaagtcaaagtgaagggccccacgttccgcgacagcattgccgtggaaggcccggaaaaaatcgccgccgaagccctgctggcaccgatccgccagcactcggccgacgtcgagacgtttatcaccgaagcgatcaagcgcaccaacaacctcaacgacgacaacgtgaagctgctgctggcgggcgacccgtcgacgccgcacaaagccaagatcgtcgaattgctgctgtccatcgcccatgtgccggtggaaaaggtccacaccatccgcctggtcgccgaccaaccgcaaaccccggaactgtggctgcgtagcttcaacggcaatgactggttgtacttcaacccggaaaccggcgaacagggcctgcccgccgaccgcctgctgtggtggaccggtgatgaaaacctgatcaccgtcgacggcggcaagaaggccatggtgaccttcagcctgaacaacagcgagatgaacgcgattcgcctggccaagttgaccgacgagaacaccgacgccaacttcctcgaatactcgctgtacggcttgccgctgcaaacccagcagaccttcatgatcatggtgatgatcccgatcggcgtcctggtgatcctgatcctgcgcaacctgatcggcctgcagacattaggcacgttcaccccggtgctgatcgccctggcgttccgcgagacgcaactgggcttcgggattgtgctgttcacgattatcacggcgctggggctgtcgctcaggtcgtacctggaacacctgaaattgcagatgctgccgagactttcggtggtgctgaccttcgtggtggtgctgattgcggccatcagcctgttcagccataaattggggctggagcgcgggctgtcggtggcgctgttcccgatggtgattctgaccatgaccatcgaacgcctgtcgatcacctgggaagaacgcggcgccaaccatgcgctgaaagtggcgattggtacgctgttcgcggcgtccctggcacacctgatcatgagcgtgccggaactgatctacttcgtgttcaccttcccggcgatcctgctgatcctggtgggtttcatgctggccatgggtcgttatcgcggttaccgcctgaccgagttggtgcgtttcaaggccttcttgaaggctgaccagtaatgttcggcttctggaagacctggaaagccctggaagcgcgcgggatcatgggcatcaaccggcgtaacgccgactacgtgctcaagtacaacaagcgcagcctttacccgatcgtggatgacaagatcatcaccaaggaacgcgcgttggcggccggcatccacgtgccggaaatgtacggggtgatcagcaccgagaaggaaatcgacaagctcgacgagatcatcggtgggcgcagcgacttcgtgatcaagccggcccagggcgctggcggtgacggcatcctggtggtcgccgaccgctttgaagggcgctaccgcacggtgtccggcaagatcatcagccatgaagaaatcgagcatcagatttccagcatcctcaccggcctgtactccctgggcggccaccgtgatcgtgcgttgattgagtaccgcgtggtgcccgaccagatcttcaagagcatcagctacgaaggcgtgccggacatccgcatcatcgtgctgatgggctacccggtgatggccatgctgcgcttgccgacccgccagtcgggcggcaaggccaacctgcaccagggtgccattggcgtgggtgtggaccttgccaccggcctgaccctgcgcggcacctggctgaacaacatcattaccaaacaccccgacaccaccaatgcggtggatggcgtgcaattgcccaactgggatgggttcatgaagctcgccgccggctgctatgagttatgcgggctgggctatatcggcgtggacatggtgctggaccaggagaaaggccctttgatcctggagctgaatgcgcggcctgggctgaatatccagattgccaatgactgcggtttgaccctgcgtacccatgcagtggaagcgcggttggaggagctgaacgccgctggcgtgacggaaacggcggaggagcgggtgaagttcgttcaagaaatgtttgggcatattccaccggttgaaggctaaatgctgacctgctctgtacacccgctgccctatcgagccaaccccgccgagtatttcgcggcgattcgccatgcgcctggcgcggtgcttttggacagcggccggccggcggctgagcgtggccggtatgacctgctgagtgcctggccgaacgtcacgttgacagtatcgcccgatgaaagcggtggcgagttcttgcaacgtttgcggaaaaatctcacgcagctaggtgaagcaaatctgcccgccgggtatgagctgccgtttgccggcggactgatcggctacctgagctatgactttggtcggcatctggagcaaatgccgcatctggcaacggacgacctgcacctgccggatgcgcgctttggcctgtatgcctgggcgttgaccagtgatcaccaggcgcagaccagccagttggtgttccatcccacgctggccgagcacgaacggcagcggttgatcgcgttgttcagccatgacgttgccgacacatcggcgacgttcaaactccagggccccatgacgccggacctcaccgccgaggcttaccgtcaggccattgtgcgtatccaggattacatccaggccggcgactgttaccaggtcaacttcgcccagcgtttccgcgcgccgtgcagcggtgatccatgggtcgcttactgcgccctgcgcgaagcctgcccgacgccgttctccggattccagagcctgccggacgagggtgcggtgctgagcctgtcgccagagcgtttcgtgcacatcagcaaacgccaggtcgaaacccgcccgatcaaaggcacccgcccacgcggcctgacgcctcaggaagacgcggccaacgccgccgaactgctggccagccccaaggaccgcgccgaaaacctgatgattgtcgacctgctgcgcaacgacctcggtcgcacctgccgcaccggctcggtcagcgtgccggagttgttcagcctggaaagctatcccaacgtgcaccacttggtgagcagcgtcatcggcgagctggccgacggcaaggacgcgctcgacctgatcgccggcagcttcccaggcggctccatcaccggcgcgccgaagatccgcgcgatgcagatcatcgacgagctggagccgactcgccgtgggttgtactgcggttcgctggtgtatctggatgtgcgcggcgagatggacagttccatcgccattcgcagtttgctggtgaaggatggccaggtgtgctgctggggcggcggcgggattgtggcggactcgcagtgggaggcggagtatcaggagtcgctgacgaaggtgcgggtgttgttggagacactggacggtttgtagtgactgggctggcctcttcgcgggcaagcccgctcccacatttgactgcattctcatgatggaactcggtcaagtgtgggagctggcttgcctgcgaagaggccatcagccgcgctgaaagccttacaggctcaacgaccgattcgaggccttgatgaactctttcttcaaatcctcaaacgtatgcaccgccgggaactgcgggaattcgcggatcacgttttccggcgcatggaacagaatcccacggtcggcttcgcccagcatggtggtgtcgttgtaggagtcgccggcggcgatcacgcggtagtagagggtcttgaaggccaataccgactggcgcttggggtctttctggcgcagttggtaactgactacgcgatcggtttcgtcggtgatcaggcggtggcacagcagggtcgggaaacccagctggcgcatcagcggttgggagaactcatagaaggtatcggagaggatcaccacctggaagcgctcgcgcagccagttgacgaactcgatggcgccatccagcggcttgagggtggcgatcactgcctggatgtcggcaagcttgagcccgtgctcgtcaaggatgcgcaggcgctgcttcatcagtacgtcgtagtcgggaatgtcccgggtagtggcacgcagggattcaataccggttttttcagcgaaggcaatccagatttccggaaccagtaccccttccaggtcgagacaggcaatttccacaagacactcccttatagatgttgttggttgagcgagcaaaaacactgccgaactctagccattcacgctcgccgccgcaacgcagggcggtttttgataccatcgctcccctatagagcgctcagcgccactgacctgtaggaaccgtcctgatgaaccaagccttcgacgtcgctgaactcgccgcgacttatgccaacaaatccgcccaggacattctcaagctggcgttcagccagttcggtgatgacctgtggatttccttcagcggcgccgaggacgtggtgctggtggacatggcctggaagctgaacaaaaacgtcaaggtgttcagcctcgacaccggccgcctgcacccggagacctatcggtttatcgagcaggtgcgcgatttctacaagatcgacatcgagctgatctcgccagaccagagcaagctggagcccttcgtcaaagagaaaggcctgttcagcttttacaaggatggccacggcgaatgctgcggcgtgcgcaagatcgaaccgctgcgccgtaaactcgctggcgtcacagcctgggccaccggccagcgccgcgaccagagcccaggcacccgcagccaggtggcggcgctggaaatcgacacggccttctcgacaccggaacgcaccctgtacaagttcaacccgctggcacagatgaccagtgaggaagtctggggttacatccgcatgctggagctgccttacaacagcctgcatgagcgcggcttcatcagcatcggctgcgagccctgcacccgcccggtgttgccgaaccagcatgagcgtgaaggtcgctggtggtgggaggaagccacgcagaaggaatgcgggttgcatgcggggaatatcatcagcaaggcctgaagttgcgctgtaaaaaatgtggaagggggcttgcccccgatagcggtggtcagccaggtcaatagtgactgacactccgcaatcgggggcaagccccctcccacatttgatttgtgttggccactgaacgtgtacacacacatgtaactatcggtgccatttatgtgtgcaatccatcttgtggcgcaccattacgtaacacctctccccacctgtcttttgtctttgcaaatcgcccggttcccaccaaaaaataaatagctgttcaaacggtcaatttatatcgctttaaattcaactagttattccatgcacctaaaaaaacgaaattacccaaggttttcatagatcaaaaactggcacgcaagtggcttaaggtgaaatacgctttgtatacaataaatacaaaacctacatacactttgccatctgcggcctggctgccgatgtgctggagcctgccggaatgcgtacaagcctctcgaataacatcgcactggatctgccctcctccctgaagcccgaagccatcgagcccagccctctggtgctgagcccacgcctgcacaacaaggacctggcgcccaccaaggttgaaggccggcgctggggtcgctatagcatctttgcgctgtggaccaatgacgtacacaacatcgccaactactcgtttgccattggcttgtatgcactgggcctgggcggctggcagattctgttgtccctcggtatcggtgcggcactggtgtatttcttcatgaacctgtcgggctacatggggcaaaagaccggtgtgccgtttcccgtgatcagccgtatcagcttcggcattcatggcgcgcagattccggcgttgatccgcgcggtgattgcgattgcctggttcggcatccagacctacctggcctcggtggtgttccgtgtgttgctgacggcgattcatcccggctttgccgaatacgaccacaattcgatcctgggcctgtcgtccctcggctgggtgtgtttcgtggcgatctggctggtgcaactggtgatcctggcctacggcatggaaatggtacgccgctacgaaggcttcgccggaccggtgattttgctcaccgtggcgtcgttggccggttggatgtatttccagaccggcgggactatcgcctggtcgatccgcgagccgctgagcggcggcgagatgtggcgcaatatctttgctggtggcgcgctgtggctggcgatctacggcacgctgatcctcaatttctgtgacttcgcccgctcctcgccctgccgcaagaccattcaggtcggtaacttctggggcctgccggtgaatatcctggtgtttgccgcgatcaccgtgctgctgtgcggcgggcagttccagctcaatggccgggtcatcgaaagcccgaccgaaatcatcgccgccatcccgaataccttcttcctggtgctgggctgcctggcgttcctgatcgtcaccgtggcggtgaacatcatggccaactttgtcgcaccggcctttgtactgagcaacctggcgcccaagtacctgaacttccgtcgcgccgggttgatcagcgccaccgtggcggtgctgatcctgccgtggaacctctacaacagcccgctggtgatcgtgtacttcctctccggcctgggcgcgctgctggggccgctgtatggggtgatcatggtcgattactggttgatccgcaaaggccaggtcgacgtgccgcagttgtacagcgaagacccaagcggcgcttattactacagccgtggagtcaatttgcgtgcggtggcggcgtttgttcctgcggcggtgatcgccattctcctggctttgttgccgggtttcgccagcgtctcaccgttttcctggatgtttggcgccggtattgcagggctgctgtacttgctgatcgccaagcgccagccgttctacgccgatgtcagcggcgaaagcattgccgtcgataacgtcagtcattaatcaaggaccttccatgcgtatcctcgtggtcaacgtcaacaccaccgaatccatcactgaaaccatcgcccagcaggcgcgcgccgtggctgcgccgggcaccgagattgtcgggctcacgccgtacttcggcgccgaatcggtggagggcaactttgaaagctatctggcggccatcgcggtgatggaccgggtgatggcctatgaccagccgtttgatgcagtgatccaggccgggtacggcgagcatggtcgtgaaggcttgcaggaattgctcaacgtgccggtggtggacatcaccgaagccgccgccagcaccgcgatgttcctgggtcacgcctactcggtagtgaccaccctggaccgcacggtgccgctgatcgaagaccgcctgaaactggccggcctgtaccagcgctgcgcctcggtacgcgccagtggcatggcggtgctggagctggaagaaaacccgttggcggcgatggaagccatcgtgcgccaggccgagttggccatcagcgaagacaaggccgaggtgatctgcctgggttgtggcggcatggccgggctggatgagcagattcgccagcgcaccggcgtgccggtggtggatggggtgacggcggcggtgaccattgccgagtcgctggtgcggttgggactgtcgacgtcgaagatcaggacttatgcgacgccgagggcgaaaaaagtcatcggttggccgcgctgaagcgttggttcaactgctgctcggcgaattgctcaatgatgaaatccacaaacgcgcgagtcttgccgggcagcagtttgtgttcggcgtagtaaatggagatgttgccgtcgtcgacgtaccagtcgggcagcacccgcaccaccgcgccgctgtccaggaatggcacggccataggcatgctcaccaaggcgatgcccaggccttgggcgctggcgcagcaggcggcttcggagtcgctcatggtcatgctcggcttgagtaccagcgggcggtgttcacgctcgatactggtcaattgccaggaccgtatacgaccggtctgcggtgaacggatgaggatcccgtggcaacgcgtcagatcttcgggcacccgcaccgaaggacgctgcgccaggtagtccggggacgccaccagcactcgatgggccggcgtcaacttgcgcgccaccaccccctgaggcagctcgaagccaccaccaatggcggcatcgaagccctggccgatcaggtcgacctggcggttatcgaaatgccagtccgggctgatgtccgggaagcgacgcataaacgcgcccaacagtggcatcacgtagcgattgccaaatactgtgcccatgctcactttcaaggtgcccaccggccgcccttcggcgctggccaggttggccacggcgttctggatggtggtgaggctgccgctgacctcttcgaggaacagcttgccggcttcagtgagggtgaggcgccgagtgctgcgctggaacaggcgtacacccaagcgcgcctctagcttggcgacacttttgcccaccgccgccggtgtcaggctcaggtgccgcgccgcttcggcaaagctgccaccttcggcgctgcgcacgaaacattcgatactgccaaagccttccatatcgaccactctaaacttttggtttacacagactatagcaatcctggtctaccgggaggggctggcgaggtcgatactcggttccaacaacaaggcatcccgccttgaacagcttggagatcgacatgaccacacaaaacctcagcggcaaagtcgccttgattcaaggcggttctcgcggcatcggcgccgccatcgtcaaacgtcttgccgcgcagggcgcagccgttgcctttacctacgtcagctcggccgccaaggccgaagaactgcagaacagcgtgatcagcgaaggcggcaaagccctggcgatccatgccgacagcgccgatgccgatgcgatacgcaatgcggtcaacgccaccgtcgaagcctttgggcgtctggatatactggtgaacaacgccggcgtgctggccatcgcgccgctggaggatttcaagctggaagactttgaccagaccctggcaatcaacgtacgcagcgtgtttatcgcaacccaggaagcggccaagcatatgggtgaaggcggccgcgtgatcaatatcggcagcaccaacgccgagcgcatgccgtttggtggcggtggcccgtatgcgatgagcaaggcggcgctggtggggttgaccaaaggcttggcgcgggatctggggccacgtgggatcaccatcaataacgtgcagcctgggccggtggacaccgatatgaacccggccaacagtgattttgccgagagtttgattgggttgatggcggtcgggcggtatgggcatgtggaagagattgccagttttgtggcttacctcgctgggccggaagcgggctacatcaccggtgcaagtctgaccatcgatggtggcttcagcgcctaggatttgcggaacaccgcaaatcaaatgtgggaggggcaagtcgaatcgtcgcaccgcccctcccacatttttaaccgcgatcaatcaggctcgaggtggcaggccgtaggccgccaggtcgaagtccgcgagcttgcggatgatctggtcggcgtggtgatacttgctgtcggccatggcttcgtccggcacggcgatggcggtcatatgggcggctttcgcagcagtgacgccgaagggtgagtcttcgaacaccaggcaatcctgcggtgccacgcccaagcggcgggcggcagtgaggaagatgtctggcgcgggtttggcggcgcccacttccgggtcgtcagcggtgacgatggtgtcgaacaggccaaaccattcgcggtgcaaggtggtcttgtgaccaaacgaattgcgcgacgaactggtgcccacggcaatcgggatattgtgcgccttcaagtgccgcaccaaggcttcggcgccgggcatgcccaaggccttggggaaacgctcgctcatcagcggttcccggatcttgaggaattcggccggtgtgatcggcaggtccagcgccttcaccacgtagtccgccaggtcctgggcaccgcgcccgataatgtgctgcttgatgccccagtcgtaggtgcggccgtagcgctcggcgatgatttgcgtgacttcggtatagatgccttcagtgtccagcaacaacccgtccatatcgaaaatcacggccttgatcggaccgactgcggtacgcggtgcattcatcacgacaacccaagggaaagactaaaaggattcagcacaatagcggtgcgggtcccatgcaggcaaccgccatgactttgtatcgattcgattcccgagttgatggcccttcatatcagtgcctcataactggcaacagttataccggtcggtgtgtgcggcgaccgtctacggtttgtgagggcagcgcgaaccgccactggccggcgtctgaaaatatcgcttgataaccttataaaagacttattaatcttccaatgaactccatccactggactagaaaatccgtaaagcaactgcttcggttgcatacgtatcatcagcaacaggtacgcgatgcggtgtcagcgctcgagcgcatgcccgaggcagccaacgtcaaggcattggtcaattacccccatggttatcgcttgcgcgtgggtaattaccgagtccttttcgattgggatcgcgatatccatgtggtcagcattgaagaggtcaagaagcgtgacgagcgaacctactgccgtacagatcatccacaatacggagggcaagccagcctttgtggtgattccctatgaacattatctggcccggcagaacgatccaaatctgattccccatgcggtggtaagccgcctggtggatggggcaacccctatccgtgcatggcgcgaacacctgaacctgacccaggaagaagttgccaaacgcctgggcatttcccaatccgcatttgcccaacaagagtcggtgaataaacctcgccgtgcaacgcgggaaaaaattgccaaggcgttcggcatcaacgccagtcaactggagctatagagcgttacgctggaaatctgccccctcagtcccctcacttaagggcttccacctggatccgcgcatgggccagtgccgtagaggccgatgctacaggccctttagtgccaaacttcacactgcccgaggcaggcaacccatgccggccagggtcgtctccaccgcttcatccagcggcgtgcaaggttcaacgcccaataccgcaaccagccgcgtgttatcgagcagcacaggggtttgccacaggtaacgcatctccagcatttcacggaaggtgacgacaaaaggcgaagctattttcagcagccaccaggggaacatcctgacgacaggctgttgccccgtcctacgcagcaccacgcactggatcgccctgctcacctgtgtgccatccgtgtccacctgccccgccatatgaaaacgcgcgaacgcctccagggtttcacggcgctcgagcagttcaaccatcgtacgcgccacatcgggcaggtacgcccactgatgggcaacacctggcgcccccggatagttgacgctgcgcacgaggttgccaggtttgaccaagccctgggaaaaccagctgttggccgcctgcgcgccgaaaaaatcaccggcgcgcacgatcagcacccgcgccccgttgcctgaagcttcgtataaccgttgctccagttgcacacggatcgcgcccttgcgggtttgcgggtgttgaggggagtcttcgtgcagtacgggaaacgcgtctggcccaaagttgtagacggtaccgggcaacacaatggtggcgccttcagcaacggccgccgcaatggtgttgtcgatcatcggcagcacccgctcggcccagtgccgatagcccggcgggttgaccgcgtgcacgatcacttcacagcctcgggctgcggcaagtacgtcatcgcggttgagtgcatcaccctcaagccagtcaaatgcggcgttctggccacgggccttgtcggcatcacgggtcaacgcgcgcacctgccaacccgccgccagcagttgccgtgcgacttcgccaccaatgccaccggttgcacccaacaccaatactgtattcatcacacgctcccacgctggttgatggggacattttctgcgcggccaggctatagaggaattgtcgaagaccattcaggcgctatacatttatgcatggcaacgaatattggttgggagctttaccggtcgttccttggcgtgttccgggaaggatcgctgtcgggggccgcacggcaactcggcattacacagcccacggtcggccggcacatcgccgcgctggaaacggcgctgggcgtggtgctgtttacccgttcacccaccggcttgttgcccacggccgtggcccacacgctgcgcgcccacgccgaaaccatggagcgcacagcggcggcacttgagcgtgcagcgtctgcccagggtgatgaagtgcgcggcgtggtgcgcgtgtccgccagtgaagtggtcggcgtggaagtgctgccgccgatcctcacgcaagtgcgccgggcacacccgcacctcaaggtcgaactggtgctgacaaaccgcctgagcgacctgttgcaactagaagccgacatcgccgtgcgcatggtccgccccagccaggagcaactgctggcgcgacgcatcggcctgatcgaagtaggcctgcacgcccgcgacgattacttgcagcaacacggcacgcccctgttgatgcaagacctggccggtcactcagtgatcggtttcgaccaggaaaacgcatttatccgcagcctggccatcaagggtttcgagcgcagcgcctttgccctcagcagcgacagcgacctagcccaactggcactgatccgtgccggtgccggtatcggcgggtgccaggtccaattggccaagcgcgatccccgcctgcgccgggtcctgccggaaggctttgcactcaagttggacacctgggtgaccatgcacgaagacctgcgcagcagcccgcgctgccgcgtgatgttcgacgcgcttgtcgaaggtttgcagcgttacgtacaggattgagacagcttcactggtgaagaatcagactccctcagtcccttcacagacgcccccatgtccgaagccttcgaagtccccagcccccacgaaaaacacatcgaacacaccaccgaacatgcccacggccgcggtgacaacttcgccagccgcatcgccgtgatgaccgcgctgatggccacccttggcgccatgctcagctaccaggccggctccaccgaaagcgaagcggcaatggacaagaacaacgccgccatcttcaagaccgaggccgccaaccagtggaactactaccaggccaaatccagccggcaaaacctggcagaactggccacccacatccccggtgtggatgcggtgcattacaaggaagagatcgagcgctatagaagccagaaggaagacgtgcgcaaacaggccgaaaagcttgaggccacctcaaaggaatgggatgaaaagtcggaacaggcgctgcaccagcaccatcgctgggcccaagcgatgaccgcgattcagatcgcgatttcgttggcggcgatcaccttgctgaccaggcgggaatggttgaagcgcctgtcgtatacggcaggcggagcagccgtgatattggggagcctggcctggctgcatttataaaaaatccccttgggcgccagagccttaccgctacatagtaaacagcataacgaaacccgaggagataccggtgtccgcacaacccaaggaagctgtgggcgccgcctacagcatcgacgccatgcgctacgcccaaggcatgacctggcaagccatcgaacacctcgcccaacgcatccgccccggcatgctcgaatccgaagcccgcgagctgggcaaacacgtcctcgccgaactcgacatgcagcgcatctggcacccactgctggtgcgctttggcgccaacaccctcaagaccttcaaacaacgctccgacggcgatccgatgctgggcgacaacgacatcttcttcatcgacatgggcgccctctggcagggtcacgaaggtgacgccggcgccaccttcgccatcggcaacgacccggacatgcacgcctgcgccagcgccgccaaagcactgttcgaccgcgtgcaagcccgctggaaaaacgaccaggtcgtcggccaggagctttaccgctacgccgaagcacaagccctggccatgggctggcaactgaacctcgacatcaagggccaccgcgtctgcgacttcccccacgccatccaccgcggcggcgacctgggtgacttcgagcactacccgaacgccggcctgtggatcctggaaatccagatcgcccatccgagcaaaccctacggggctttctacgaagacctcctcgcttaaggaacgcaaatgaaccgcgccaccgaacaccccgtgctgttgttttcctacggcacgttgcaggacaaatccgtacaactggccaacttcggccgggaactggcgggccagcaggatgcgatgctgggctattcacagagctgggtggagatcaccgaccctgaggtgctggcaagcagtggcaagacgcatcatccgattgtggcgccgagcgctgaggcaggcgccaggattgaggggatggcgttccggattacggagcaggagctggcggcggcggatgcgtatgaagtggcggactacaagcgggtggaggtggggttggcttcggggttgagggcttgggtgtatgtgcgggcgtgatatgaacaagggcggctgaattggccgccctttcgagagagtaccgagcctacttgcacaccattgacacttgagtttggtgctcatactcccaccctctacacgccaaccctacgtgcttgggaatcaaagcagcaccactgctataggccgtgatagtcctacgtgagaagcccaattcgaccgcagcggcggacagggaaagattgttgctgagcatccactttctgaaatcctgcgtgagcataacctcgccggactgctccagtgccaggcggtgcaaggtcacggcagacagctcaaggtcattgccccatgtcacatcaaagccccattcacctacagctacttggctgaagagccccaggtccataagcggcttgaggatggggaaagtttttatatgatcgatgagatcgacggtatgttgcttaccattgttccactcgatttctagagcatgcttgccggcaactggttgcacagcagaaatgcgaagcttgctggtcataagtcagttcctccggttttgttcatcccatacccgatgaagatcagcgatatgagcttttgcccaattcagggcggctttcaaggcctttgtttcggcacctgcgccaagcacgacaagcccttctatctgaaccaaacactcgccatccggggtctgcacgtgaaagtgcggtggcgcgtggtcgtcgggatagatttttattttccagtttcgttcactgtgaagagtagccatgaggtcagatgctagagaaatattttccctggcacaactcgattttcttacctcgatagtcccgagaccttagctttctggaaacctatagcaatcggttgctggcaccttgagcaacatcacaagtttgcgaaatgtcctacgcgctttccggaagcgccactctcccacctcatcatctccatgcctatagtcaccgggtcgctcgaagagcgattgggtttggcgacccgactacaagacggcagaagcctcccggcagatttgcgggatgcccctgtacgcaataagctgctccatggtggctgtgcgtgggagaccttcgggtctgccggtctttgtccgttcttgtcccggttcgccaacctgcgtacagctgccaccttttgtttggcgacaaatgcgtggctccccccctaagtgaacggacttaacgcatgaaccaatacatggccctcaccagcaacgacagcaccacacccgccctttttgtcgacacaaccgtcccgcttgaaatcctcctcgacgctgcgaactatcgacttcgtgctgtgacgcaggtgcttgaaaaccttgcgctgcgtagtgagataagcagcgatgcggtggtactcagcgactttgctttactgtgctctatcccgttgcgggatgggtgtgacttgctggatatcatagagcggcgaatggatgtatcgcagccttagaagatattgcatgccgctttaggactatagctgccagtttcccttggttcggtataccaatccaaggggtgctggtttccgagggccgtgaaaaggcccccacacttggcacagatgtgggggccattgaacataagcggcgttattggtaatcctacaggtctaaacctttatggatttcatctagggtcacatccagctcttggttcaactggtcatgtacggtttggctgactaacccatgagtcagcagcgcagccagatagcccagcgtgtacatcgcaaagccgtgccgcttcgccggttcgttcttgaccctttcgatgttttctttcaagaggatgaatttactacgcgcttcggcaatggtgcgcgggctgtctttttcggttgggagcatcggcatagcggggattcctttctgttcgtaaagccttattgaaaggcttgccacaattgatagcagaaaatccacattaacagagagcctgcagccaaaccgcttagcactgaagggaccaaaaaaaaccaccataccctctgtgaccgaacttgaaattactgacttgatgcgatgaaccgctggataagttctggcccactcatgttttgtatcatcgcgctcgttcgagacatatggatgttgctccatatcatcttgatgacctcccaagctataaataacaccagagaaagcacagcaagaagcccacagagggcatacaaccgaggcggtagcttcggggaaagtgtggaccaaagcccaaaaaaccctgcatagcctgctactaagatgaggttgatataggttcctgcactagccatctgcctttcgtgcatctgtatcagtgcgttagcgcccttatctccttccagatgaagctgaaattctttgagttcatcaatagcttccgagtgcgtattcaccacggtttccacctgctcgttccattgctgctgattcatctcgttccgctcctttggagagttattacagatgggctcgtggacgcaaatatcgaccggcgtcgagcccaatatgcgccagatgatttggcgtgaaaaccaccctaagctcccgggttccgcacgctccgtttttcgcaccaatatagagcaccagtcccatggtggtcccatgaggctattttttggacgccaaaaaccacaaacccccgactttctctaggaaaatcaggggtttgcgttttcgtaatttggcggtgaaggagagattcgaactctcgatacaatttcttgtatacacactttccaggcgtgctccttaagccactcggacacttcaccgtatctcgtcaaaccagttcagtctgtcgaggcgcgctaatgtagtcgaaagcctttctgatggcaaaggtttttttcagaatattcatgcggttagccggttatgccgctcaccgcccggcaacgggcggtgattgtgccattctcaggcatcggcggtagacgtctggggcggcgattgcgccctgcgccaggcattccgatgcgctgtgcagggcaaaagcctgaccggccagtcagtcacagcgctttaccggggcgggcgtggtgggtaacgtctgctgcattcttctataacaagtcctacaaggaaccgcgtcatgagtgagttgattgcctaccacctcgaagacggtatcgcgaccctgaccttgagcaacggcaaggtaaatgccatttctccggcggtggtcagtgcctttaatgaagcgctggaccaggcggagaaggaccgggcggtggtggtgatcaccggcacgccggggattttgtcggggggttatgatttgaaggtgatgaccgccggccccaaagaggccatcggtctggtgacgtccggttcaacgttggcgcgtcgcctgttgtcgcacccgttcccagtgattgtggcgtgcccaggacacgcggtggccaagggcgcctttttgctgttgtcggcggactatcggattggggtggatggcccgttcagcattggcctgaacgaggtggcgattggcatgaccatgcaccacgccggtatcgagttggcgcgggatcgcctgcgcaagtcggcgtttcatcgttcggtgatcaatgccgagatgtttgacccgcagggcgcgttgcaagccggcttcctcgacaaagtggtggcaccggaagagctgcacgcggcggcgctggaagcggcgcgtcagttgaagaagctcaacatgaacgcccacaagcacaccaagttgaaagtccgtaaagaactgttggaagccttggacgacgccatcatccaggaccaggggcatatcctgagttaagccctacgcgtgatgtaccaaagcccgaccttgagtcgggctttttcttacaaccaattccgaatcatcttcagccgctctagcttgcccgtatcgacagatgttgaaacatgcgcttaaacatcgcctatctcctacctctaccggggtaattgccgaatacagtgcacaaccgtacactgcgccaccttttgtgccggtgggccgtgtcgatgcttttcctgttgcgtatgttgttgatgggcctgcactttatgcttgccggcgtgctcggcgtgctggttggtgtgtgccggccgttcaacccggacaacagtcgcctgtgcgcacgcctgtacgcgctgccggccatgtggatcctgcggctcaacgtgaaggccgatgtggactcgctgcgcaacaagcccggcacctgcgtgatcatcgccaaccaccagtccaactatgacctgtttgtgttcggcaccgtagtgccctaccgcacggtgtgcatcgccaagaaaagcctgaagtgggtgccgctgttcggccagttgttctggctggcgggcaatgtgttgattgaccggggcaatgcccacaaggcacgccgggcgatgcttaccaccacccacacgttgcagcacgaagacacttcgatctgggtgtttccggagggcacgcgcaacctgggccaagggttgctgccgttcaagaagggcgcgttccatatggcgattgcggcgggtgtgccgattgtgcaggtgtgtgtcagtaactacgtgacacatatgcagctcaatcgctggaacagcgggggtgtgctcatacggtcgttgccgccgattcctaccgttggcctgacttcggatgacatcccggcgttgatgcaggcgtgtcatgcgcagatggaagcctgtattgacgagatggaccgcgagttgcgggctgcctgaacactgcttgggggcgcttcgccccccagcgcgagcaagctcgctcaccacaaaatgctcgatgcaacgacggaacgccattcaggctaagctgcccaacacctgtcatcccaataagaagcgatcagcaccatgggtagagttgttgcggccgccgtctacagcgccggtaagaaagtttcggatatcaccctcgatgaaggcgcggcctgggccgccaaacccgaccactttgtgtggatcggcctggaagaacccaacgcccaggagctggccaacctgcaacgccagttcaacctgcatgaactggccatcgaagacgccctggaaaaacacagccgccccaagctggaaaccttcggcgatgcgctgtttatcgtcacctactcaccggtgcgcgagaacggcaagctggagtttatcgaaacccatatttttgccggcaacggctacatcatcaccgcccgcaatgggcactcggcgtcctacggctttgtgcgccagcgttgtgaggcgcggccgctgttgctggagcatggggaagatttcgtactgtatgcgctgctggatttcgtcaccgagaactaccagccggtgagcgaagcgatccacgccgagatcgatgaactggagcgcaacgtgttgtgcagttcgttgagcgagcgcgatatccagaacctccacggtttgcgccgcgatgtgctgcggctcaagcgttacgtggcaccgatggtggagatcagccaggagctgcagaagctcagcttcccgttcatcgacaagaacatgcgcccgtactttcgtgacgtgcagattcacgtgacgcggcagatggaagacctcaccaccctgcgcgatatcgccagccagaccatcgaaatcggtgtgttactggaggcttcgcgccagagcgtggtgcagcgcaagttcgccgcatgggcggcgatcctcgcattccccaccgcggtggcggggatttacgggatgaacttccagaacatgcccgagctgcaatggcactacggctattttgcggtactcgggctcattgccacgggttgcacggggttgtgggccagtttcaaacggtcgggttggctttaaacctgagcttcggacttgtgcgccacaaaccgcatcatccattccgccacggttgcaccgtggtggtcgcgctcaaggctggctacgccgtttgtgtagaccttttcgcccagggttgtctgaagaatctccagcaactcgcgggaataatcatggacaaattccgggtgtccctggaagcacagcacctggtcaccgatgtgatacgccgcgaacgggcaaaacgcgctggaggcgatgacggtggcattctccggcaacgtggtcacctggtcctgatggctgatcaatagggtcaattccggtacttcagggctcatccacggggccttggcatcgagctggtagtcgtggatgcccatgccccagccttggccggcgcgctcggtcttgccgcccagcaacagtgccagcaattgatgaccgaagcagatgccgagcagcttgtcgccacgctcgtaacggtcgagcaggtaggtcttgagagtctggatccatgggtcagtgccgaaggagtcggccttgctgccggtgaccaggtacgcgtcgaacacttcgtcgtccgaggggtattcaccgttcaccacgttgtacaccacgaactcggcgggaatcggctgcttggcgaacaggcgcttgaacatctgcccgtacccttggtattgatcgatcaagcctggacgcaggatatcggtttccaggatacagacgcgtagcgacataaaaaatacctgacacggtgatgggaatattgcacaccccagagcctgccttgaaataccccttcaaggcaagccccccagcttcaccggaacacttcaccctgcgccgctttctccagcaacaaccccggcagcatgaaacgttcgccatactgttcagccaggtagcgagcgcgggcgataaagtccttcagcccatattggttgatgaactgcaacgcaccaccggtccaggccgcgaaaccaatgccaaaaacagaccccacgttcgcgtccgccgtggacatcaacaccccctcttccaaacagcgcaccgtctcgatcgcctggataaacagcaggcggtcgcgtacatcctgcggcgagatgcgctgatcaggtcgctcaaagcggcttttcaactccggccacaggtacttttgcccgccgctggggtactcatagaaaccgcctcccgccgccttgcccgcgcgcttgtattcgttgaccaacagatcgatcaccgctgtcgccgggtgcgtaggcagcgccttgccttccgcctgcagatccttggccgtctgctgtcggatatggctcatcaggctgagggacacttcgtcagacaccgccagcggccccaccggcatgccggccttgcgggcttcggtctcgatcatcggcgcggccacgccttcgccgagcatggcgatgccttcgttggtgaaggtgccgaacacgcgtgatgtgaagaagccacgactgtcgttgaccacgatcggggttttcttgatttgcaggacaaaatcgaaaccacgggccagggtctcgtcactggtgcgcgcgcccttgatgatttccaccagcggcatcttgtccaccgggctgaaaaagtgcaggccgatgaacttggcttgatccggcactgccgtggccaggccgctgatgggcaaggtggaggtattggaggcgatcacagcgtcggcgccgaccaccctttgcgcagcggccgagaccttggccttgagttcgcggtcttcgaacaccgcctcgatgatcaggtcgcagcctgccagatcagcatcggatgccgtaggacgaatccgcgccaagacggtttcctgctgctcggcggtcaattgcccacggctgaccttcttgtccagcagcaccgccgaatgcgccttgcccttctcggcggccgccaggttgatgtccttgagcaccacctcgataccggcgctggcgctgacataggcaatgcccgcccccatcatcccggcgcccagcacaccgactttgcgcgtgacatacggtgtaaacccttgcggccgcgaactgccggcgttgatctcgttgagctggaaccagaaggtgccgatcatgttttttgcgacctgccccgtcaccagctcggtgaagtaacgggtttcgatcaggtgcgcggtgtcgaagtccacctgggcgccttcgacggccgcacagagaattttctccggcgcggggaaacagccgttagttttactgcgcaaaatcgacggcgcaatggccagcatctgcgccacttttgggttcgatggtgtaccgcccggaatctggtaggccttgttgtcccacggttgcctggcgtccggattggccaggatccaggctcgggatttggccagcaactcatcgcgatccgccgccagctcgttgatcaagccggcttgcagcgcctgttgcggccgcactttcttgccttcgagcaaatacggcaaggccttttccagcccgagcatgcgcaccatgcgcaccaccccgccgccgcccggcagcaggcccagggtgacttccggcaagcccaactgcaccgacttgtcgtccagcgcaacgcggtaatggcacgccaggcaaatctcccagccgccccccagcgccgcgccattgatcgcggccaccacgggcttgccgagggtttccagacgccgcagttgcgctttcaacacccgtacaccgtcgtagaaatccttggcgtgggccttgtcgaccttgatcagttcattgaggtcgccacccgcgaaaaacgtcttcttcgccgaggtaatgacgacgccggcgatgctatccctttccgcctccaggcgctccaccgtagccgccatggcctcgcggtacactgcgttcatggtgttggcgctctggccgggcatgtcgagggtcagcaccacgatgccgtcctggcctttttcgtaacgaatggcttgggtcatgacaagttccttgggctcagaggcgttcgataatggtggcgatgcccatgccaccgccgacacacagggtggccaggccatagcgctgctggcgtacttcgagttcgtcgagcagggtgccgaggatcgcgcagccggtcgcgcccaacgggtgccccatggcaatcgagccgccgttgacgttcacgcgtgcggcgtcgatgcccatgtccttgatgaacttgagcaccaccgaggcaaacgcttcgttgacctcgaacaggtcgatgtcttcaacgcgcagtccggccttggccagggccttgcgcgtggcgggcgcggggccggtgagcatgatggtcgggtcggtgctggtgaccgctgtggcgacgatacgcgcccggggttgcaggcccagctcgcgccccttggcctcggagccgatcaacatcagcgcggcgccatcgacgatgccggaactgttgccgggggtgtgtacgtgatggatgcgctctacgtggctgtagacacgcaacgcggtggcatcgaagcccatctgcccgatcatttcgaaactcggcttgagcttgccgaggccttcaagggtggagtcgccgcgaatgaattcgtcatggtccagcagcacgatgccattctggtcctgcaccgcgatcagcgacttgttgaaggaaccgtctgcacgcgccctcgccgcgttctgctgggaatgcagggcaaaggcgtcgacgtcctcgcgggtgaaaccttccagggtggcgatcaggtccgcgccaataccctgtggggtgaagtgactgtgcatattggtctgcggatcgagcacccaggcgccaccgtcactgcccatgggcacgcgggacatggactcgacgccgccgaccaccaccagatcctcgaagccggagcggactttcatcgcccccaggttgaccgcttccaggcccgacgcgcagaagcggttgacctggaccccggcgacgctgatgtcccagtccgccaccagcgcggcggtcttggcgatgtcggcgccctggtcgcctaccggggtcacgcagccgagcacgatgtcgtccacctggtgggtgtccaagtcactgcgcagggccagcgccgtgagcaggccggctaccaggttcaccggcttgacgctgtgcagggcaccgtccgccttgcctttgccacggggggtgcgtatcgcatcaaagatcaacgcttgggtcatgacgtcctcgaaccagtgtgcatgtgtgcctctaccttaggcccgattgacacggtttcaatgacggatgcgctcattgcttttgaccccctcgctcggacgaacggtaggcacctaaggtaatcacctgattaatcgttttagctgtctagccaaggcattggcgccaagatggcgatatgcctcatgcctttttaagctgaaattctgattagctgatatgaaatgagtctaagccgcgaagaacgagggctctaaggttgaatcagtaagaagttgctgccgggttttgctggagcaactgtaagaaaagcgacacgtcatctcgccatactgaaataagaccggcacgcatttgacgctcaggaataacaacaaaaggcagtcagccatgttcaaacattcgaaagtacgtcaggcgggactcattctgttcgccaccacactgattctgatcttgcccaatttgaccaaggtcattgggtgaccccccaacgccacattccgtgcattcacagcaccgggtctgcagcttttggcagcgcctgccaggacattgcgcatagcggtccggcaggggctgtctttttgcgcgccgatttccggtatcgttagcttaaacagccctttgattcgagcctgcgtcttgaaagccatccttgccctcctcgccctgctgatcgcgcttcctgctgcggccgcgcaattgaccatcgaactcaaccactcccgcaagacctggcagaccgccgacttgctcaagcacccgcaagcgcagacggtgcagatcgacgatgacgtctcctacaagcgcagcatgagttatcgcgcagtgccgctggccgtgctcctaccgggtttgaaacccgagagccatctgcaagcggttgccctggatggattcgccgccgaactcaccgccgcgccgttgctggaacaacagggtgcacgtgcttggctggcggtggaggatcctgctcaaccctggccggcactggcgcagggcaaacccagtgccgggccattctacctggtgtggaccgacccgcaagccggggctatcagccctgagcagtggccgttccagatctccgggatcaagcagttgaacacggtagcggagcgctttccggcgttgttgccggatccgaagctggcggccaacgacccgatcaaccagggttttgccctgttccagaaaaactgcctggcctgccaccgcatcaatggcgccggagacgcccaggtgggaccggacctgaatatcccctacaaccccaccgagtattttggcggtgatttcctcaagcgctatatccgcgacccacagagtttgcggaattggccgcaggcgaagatgccggcgttcgcggccagcgtgttgccagacggtgagctggatctgttggtggggtatttgaagcatatggccgggcgtaaacagcaaccttaaacatccggtggtgaacgcgttgtggtgagcgggcttgccccgcgttgggctgcgcagcagcccnnnnnnnnnnnnnnnnnnnnnnnnnnnnnnnnnnnnnnnnnnnnnnnnnngggctgctgcgcagcccaacgcggggcaagcccgctcaccacaacaaatctgctcaccacaacaagtccgccagccacaacaccccgctcgccgcaaccgaatcattgctgctggacggaaatcaccggcgtcggcgccacgaacaccttcgcatgcatctgctcgtgccccccgccccggcgcatgccgcgcaccgggcaagcgtctaggtaatccagccccaccgccagcttcaagtgccgctccgggcgggccaactggttggtcacgtcaaagctgtaccaggcgtcatccagccaggcttcggcccaggcgtggctggccaggtgcgtgctgtcctcggtgtacaaataccccgacacataccgcgcaggaatgcccaggctacgcgcacaggccaggaacgcgtgggtgtggtcctggcacacgcccgcacggccggcgaaggcctgggcggcgcaggtgtcgacctcggtcgcgccgggcgtgtagaccatcgcctggttaagtgcctgcatcaggtcgatcaatgccgtacggtcgcgccgttgatggcagtgctgttcggcaaaaccacgcagggcttcatcgggttcggtcaggcgcgtgcagcgcaggaacgggaacgccgattggctctcatgctcggcctcgcgcaactcgtcgatgtccacctggccacgcgcgccaatgatgatggcgtcgtggggctcgtccagggtcaacacatgcaggatgttgccgaacgggtccacctgggcacgcaccgggcgtggcaggtcaagttgccaactgagtacatgctggcgctcgctgtcatggggcgtgaggcgcaagtattggatgctggcgcgcacctggtcttcatagtggtaggtggtttcgtggctgatggagagtctcatgccgcctccaggtaggaactgtagatggcgtcgcccaactggcggaccaaaggaataaagtcggtcagccaggcgtgcaggccttcctcaaggatttcatcgatggcggtaaagcgcaggcgcgcatccatctcggcggccaggcgctgggccgggcggccgttgatgccaggcaggctggcgagtatctggtcgatctcttcactgcaggcccgcagtgagcgtggcacatcggcgcgcaacagcagcaactcggcgacttgccgtgcgccgggcgcatcgcgatagatctcggtgtaggcctcgaacgacgacaaggcacgcagcaaggcgctccattgatagtaggcgtgggccgtgccatcggtgacagcctcggcgcggtcaccggccatctcatagcgggcgtccagcaggcgcagcgtgttgtcggcccgttcgataaaagtgcccaggcggataaatcggaaagcatcgttgcgcatgatggtgccgtaagtggcaccccggaacagatgggagcgctccttgacccactcacagaaccggctcatgccataacggctgaggccctgctgggcgatatcgcgaatatccagccaggtggcgttgatgttttcccacatatccgcggtaattcgcccacgcaccgcatgggcgctggcccgcgcggcgccgagacaactgtagatgctggccgggttggccgcgtccagcgcaaaaaagtgcaacaggcgttcggcgtgcagttcgccgtgacgttcgtggtaatcgtccagggtgccggtaatcaatagcggcatggccagttcatgcaggccgtcgccgcgcccatcctggggcatcagtgacagcgaatagctgacgtcgagcatgcgtgcgaggttttccgcacgctccaggtagcgcgacatccagtacagatccgaggcagttctactcaacatggcatcagtcctcgaccacccaagtgtctttggtgccgccgccctgggacgagttcaccaccagcgaaccttcgcgcaaggccacgcgggtcaggccgccgggcactacacgggtctccttgccggacaacacaaacgggcgcaggtcgatatggcgcggcgcaatgccgttttcgacaaaggtcgggcaggtggataaacacagggtcggttgggcgatataggcgtggggcttagccttgatccgtgctcggaaggcttcgatttccgctgccgtggacgccgggcctaccaacatgccgtagccaccggagccttgggtttccttcaccaccaggtcgggcaggttggcgagtacgtgggatagctcgtccggtttacgacactggaaggtcggaacattcttcaggatcggttcttcatccaggtaaaaacggatcatctcggtgacgaaggggtacaccgacttgtcatccgccacgccggtgccgatggcattggccagcaccacattgccgcagcgataagccgcgagcaggccggacacgccgagcatggagtccgggttgaaggccaggggatcgagaaacgcatcgtcgagacgacggtagatcacgtccacggccttgggcccatcggtggtgcgcatgaaaacgcggtcatcgcgtacgaacaggtcggcgccttccaccagttccacgcccatctcgcgggcgagaaaggcatgctcgaagaacgcgctgttaaagcggcccggcgtcaataccaccacgctggggttatccagggggcttgagcttttcagcgtgtcgagcagcaggttgggatagtgatcgatgggcgcgatgcgctgggcagcgaacagttcggggaacaggcgcatcatcatcttgcggtcttcgagcatatagctgacgccgctgggtgtacgcaggttgtcttcgagcacgtagtacgtgccgtcgccatcgcgtacgaggtcgacgccggagatgtgggaatacaggtcgcggtgcaggtccaggccctgcatcgccagttggtattgctcgttggccagcacctgttcggcaggaatgatcccagccttgatgatgcgttgctcgtgatacaggtcggcgagaaacatgttcagcgccttgacccgctggatacagccacgctcgacaacccgccattcgctggcgggaatactgcgcgggatggtatcgaagggaatcaggcgctcggtgccctgctcgtccccgtagagggtgaaggtgatcccggcgcggtgaaacagcaaatcggcttcacgccggcgttgagccagcaattcaggcggggtttcggccagccagcgggcgaactcgcggtaatgcggtcggaccaggcctgccccatcgtacatttcatcgtaataagtgcggatcatgccgaactccttgtcacccgggcgaaagaaccatcgcaaggcccgtgccagcggcataaacacttaaaaatcagtgagttgaattaaccacgcaatctgctcgcaccgtcctggtgcgcagaatgcccagtgcactgccccacgcttcatcgcaatgcgggctttgactatcaacagcatagtcagagttgatttcactgcccggcgcaggctgcggataatcggccccatctgctgaactgccttcagcgctccgctcttccctttaggccacccgtatgggtggcctttttttggtgcgtaaaaatagcgcgcaagttccgagttattttcccaccgcacaaacaaaatcggccgacccaaaggccagccgatacgctgtgttgctcataaactgccgctacatgggtaacccacgcacctcctgcttcacgccccatccttcgatgatcccgcccagcggctcgaccaccgccccgaagtcttgctcgaaatctcctatgccgtcgtaggtcgcaaacatgactttgctcagttccaggtaccaggcgccatcgtcgcgcgcactcacctgggcattcagggattccccgcgaaactcacccgcagccctgcgcgcccgttcctcatccgggaaaatggcgtagaactcgatggggtgaaaacgcgagaagtcgaagccgccttctttcatgcggcgcagaacattggtgctgatgtcttcttgataggctgtgctcatgaaaagtgctcctcaaattgatggatagactttccgtgcttcccgaagcccacgccgcaatggcgtggggactacggcaacaacatcaccgctggaaaacaagcatgtagctgacaagaccagaactagcgattcattcgctgatctcgtttgcagagtagcgcgaagctatcacctccaccagaggcgcttggatggactacagggaatgttcaggcggcgggagagatgtcgaggatctggatgctgttctggtctttgaggatcttgaccgtcggctcgggcttgcggccctccagatcattgaggtccagttcggcggcgacgggcaccagcttgttgcgaatcatgtgcgcagcgtcttcgaggctgggcttgtgttcgcaggtgaactgctccacggtctgcacgccgtgatcatcaacgaaggtaatttgccacgtttgcatcggtgcctcctcgataaaacccatgtgtgggcttacacatatctggaccttgagcgctggacaaacgttccactcaaggccggaggcaccggatcagctgcagttatttttccgcgtgttgcttcaaggctttcaaggtgttgaacggagcgtccaccacgaacttgttggccagccacgagggcacgctgccgcctggctcggtatgcacctggtaggtgacttcggtcaggttgtcgcctttggggaccagtttccagaagccttcaacctgggctacgcgtacgaagcctttttcttccggctgataagtaggaacctccagcaaggtccgagtgacactgccatcggcacccttggcagtggtgattttcaggatcgaatcacgattactgacggggaacggcgcattgaactgggtgtaggtatagctgacgtcaccctcatgtttcagcagcttctgcaatttgcactcatgaatccacttgcacgcaccgactacgtcttcctgcaacgcgacgatcttcgccaccggtgccttgatcgtggtcaccccgcgatacgccttgtacttggagccggcaatttcgctcagggacaccttgataccgtcttcgtccttggcgacttgccaatcctcagcctgggcagtggcagcaaacaacaccgtaaaaccgcacaacacagccattcgtttcagcgaacccattgttgtattccttattgttgaagttccgatagtaaagcccatcaagccgccgtcatctgctcccaccagccgatcaagcggatcgcatcggcctggtcggtgccgcagacctcgagatccgccttgaaatcactgcacaccgccggtcgctccggctggccgaacagcaggcatagctgttcgaccgataggtgcaggcagcgttcgcccgccggtttgccctgtggcatgcccggtaatggcgaactgatggagggggcgatgcagcaagcgccacagccttcacggcaattcatgaccagcaggtcctcgacgactcaatgtggatggccggactagagtacgccctaaaacagccgttttaaaatgggttaacaggggtttttcgcagaaaacaaaagtgactgaccagtctgcgacagatggtcgagggcacgcgtcacgtttgtgggaaaagtttactgcttgaactcgaactccaccgcggcgccttcgacttcgcgccgttcttcgttgcgcaattgcagcttcatttcattgctgagcaggcggccgttgatctggaaggcgctgttgtcggtgggtttctcaccgaacatcggcggcagcaagggcacacttttgggtttgggcatggtaccgataggctgcaagtgcctgaccatgtccgacggcagggacaggtccaactgtgccggtggcaattgtgtctgcgtcacttcgcgggatgccttggacttgctggctgcacgttttttggcggcagcggtgggtttcttcaccgctggggcttttttaacgggagccgtttttttcgcggagggcttctgctcgttactggcggccggcttggtttcactcacaggcgctgccgccagcactgtgccgacgttgcacaggcttaacaggccaattaccagaacagcgcgaaaaatacaggtcatatcgcctacagcattaacggcagagggccatatgctcgcttgttgtgcgcggcatgacaagcacagtgattagtgtgctagaggatttgtcccctttctgagcgtcataatcctgctgctgtttcctggcataactggctcgccagcatccccaacgtcatcagcgcccgctctgcctcgcggttccacggggtgccgcagttcaggcgaatacagtggttgaactgctccgtattactgaagatcagccccggcgcaatactgatgccctgttgcagtgcgcgcacgtgcagttcctgggtattgacccttccaggcaaactgacccacaggatgaagccgcccgtcggacgggtcatctgggtgccttccgggaaatactgctgcaccgccagttgaaaggcgctgaggttcttgcggtattcctggcgaatgtagcgcaggtgccggtcgtagccgccattctccaggtaagcggcaacgcccatctgcgtgacactgcacgcggagtgggtgctgaacatctgcaggcgctggatctcctgctggtatttgccggcgatcatccagccaatgcgcacaccgggggacagcgtcttggaaaagctggagcaatagatgacccgatccaggcggtcataggctttcagcgccttggtgcggcccagttcgaacatcagctcgccgtagatatcgtcctcgacaatctggatgtcgaagtccgaggccaggcgcagtaactgtttctgccgttcctcaggcatggtgccgcccagcgggttgctcaggcgcgtggtcagcaccagggccttgatcgaccattggttggccgccagttgcagggcttccaggctcatgccggtggacgggtcgctgggaatctcgatgaccttgaggcccaacagatcggcgagttgcagcaagccgtaataggttggcgactcagcggcaatcaggtcgccaggccgcgtcagcacccgcaacgacatctgcaacgcatcgacacaaccgtgggtgatcaccacttcggacgggtccaccaccacacccgcatcgcgcatgcggatcgccacctggcggcgcaacggttcgaaaccggggctgaacatgtagctgaacgcacgcgggctctggaagcgcgtgaccttggccaattgctggtgcagggcgcgtactggcaggtagtccacgctcggcactgcagcgcccaacgggaacacaccttcgcggcgcgattcgcccaagacctgttgaatgatactgctgcgggtgaccaaccctgggcgctcgacccgtgcaatgtccggcgtcggcgccgtgagtgctggcgtctggtgcacataatagccggactgtggccgcgcccggatcagcccctggtcttccaggttggcgtaggcctgcaacaccgtggcgtggctgacgttcagctgtgagctcatcttgcgcaccgaaggcacgcgctcgcccggttgatagacaccgcgccggatatcctcagccagttgctgggcgatacgttggtaaagcaacagattggtcatgacgcagcactcgatttcacgggtattttatttttgtgtgaaacataccggcacagtttagaagtgtacggggacagttgccacaatagtcgagcgcgcgtttgagtgacagtaaaactgtgagggtgcacaccaaaaaatgtgggagggggcttgcccccgatgacggtgggtcagcgacagatttgctgactgatgcaccgctatcgggggcaagccccctcccacattcagagcggctccaggcttctatcgggcagcgcccagttggcctttctcgtcagagaagacgatttcaacgcgacggttctgcgccctgccccgctcggaggcattggcctccaccgggtactggtcgccatacccttccacctggatgcgtttttcgtcgatccccaggtcgaccagcacatcagccaccgactgcgcgcggtcgcgggacagtttgaggttttcctgctcgccgccggtgttatcggcgtagccctcgatacgcaccacacgcttggggttcagttgcaagaactgcacgatcttgagcactgtgcggttggccgagttcttcagctcggcgtcaccggtgtcgaacagcacatcgcccagggtcatcaccaggccacgatcggtctgggtggtggtcaggctggcgatctgctcttcaagccatttaccctgctgctgcacgctgctcagcttgctttcacgcagcgccagctgcaggcgctggcgctccagttcgagcttggcgccgcgctcctggttgagcgcctgttcggtgtgttcgcgggcaatcgcgctatagcgctggctcaagtaggcgtaatgcaccacgtcggcaccgctgccccagtagctggacaggcgatcggcacgggccagggactcaccggcgcggatcacgtccttgggcgcaaagcgcaacacattggcgtcttccttgaccttctggaagtcattcccggcctgttgcagggcctgttcgctgtcgggatggctggcacaaccgcccaatacagcagtgcccaacagcagcgcacagcccaaaccacggatcatcggactcattgggcttcccccaactgcaattgcttgcgcaggcgagtgatgcgggtgttgagcacgttcaactgctcctggctcttgcgggtcaacactttggcttccgccagacgcgcgtccaactcggcttgctcaaagcgcatgcgtgcatttttgtaggactggtcagccatgctcgacttggcccgggcgaatttctcttcggccagtttcagttcgggcgattcatcggggttggcgccaacagcgctggcttgctccagggcttgctgggtgaggcgaatttgttcattcggcgcaggatcagctgcacatcccgccagagcgacaacggcgagggccgcgaaaagaggtcgaagagtcactgaaaatccctactttgttggggtgccgacgggttgttgcaattgcgctttccaacgttccagattgcgctgcaatgcggcttccgtcacaccagacccgggcaattctgtcatctttttggcgagctgtccgcgcaaccacggatcgttgcaggccgagttgtgggaaatcgccaggtacaggcccggctgatcgacgggcacgtcgcgggtgatcaggtcgttgctcatgcccaaggtctgtgccattgccatgccggaataacgcccggcgaggacatagtcgacctctcccagcagcagcttctgaaacgccggcgtcagggacggcaggcgttgcaggctcaattgctggccggcgaacgtttcgaaggcggcactcaaacgcgcacgttccgacaccgcgcctttgtgcccgtgcaggtcggccgccgtggtgtaggccagcgctgaatccttgcgcgtccacactaggtagtcgagctgcaccagggccgggtggatgtagtcgagggtttccagctcgcccaggttcagcggcgcatcggcaaggatatccatgcgcccgctgcgcacctcatccagggccagcgaacgtttgccgccgtagagcaggtcgattttcaacccgaggtccttgcccacttgttgcagcacgtcggcggtggcgccgatgaggtgcgtggggtcttgcgggtcacgccagagcaggggcggcgcgtccggactgccggtgatcaccaggcggtcgcatttgccggcggccagcgtcaggctcggcagcagagtgaggcccagcagtacggcccagggacgcagttccatggcaagtgtctccagcaagtcaaaaaaaagcccggtcacatggaccgggctctttataagtgaagcgactggattagaccagcttctccaactcagggacagcttcgaacaagtccgccaccaggccgtaatcagccacctggaagatcggtgcttcttcgtccttgttgatcgcaacgatcaccttggagtctttcataccggccaagtgctggatcgcgccggagataccgacggcgatgtacagctgtggcgcaacgatcttgccggtctggccgacctgcatgtcgttgggtacgaaacctgcgtcgacggccgcgcgggaggcgccgaccgcagcgcccagcttgtcggccagggcatacaggtgcttgaagttgtcaccgttctgcatgccacggccgccggaaacgacgatcttggcagcggtcagctcaggacggtccgacttggccagctcttcgccaacaaagctggaagtgccagcgtcgtgggcagcggcgacggcttcaacggcagccgaaccaccttcagcggcaaccgggtcgaaaccggtggcgcgtacggtgatgactttgaccgaagcgttggactgtacggtagcgatagcgttgccggcatagatcgggcgcttgaaggtgtcggcgctttcgaccgagatgatctcggagatctggtcaacgtccagctgcgcggcaacgcgtggcaggatgtttttgccgttggaagtagcggcagccaggatgtggctgtagccagcgcccagttctgcaaccagaggggcaacgttttccggcaactggtgagcgtaagcggcgttgtcggccagtagtactttgctcacgcccgcgattttcgcagcggcttcagccacggcgccagcgccttggccagcaaccaatacgtggatatcaccaccgattttcgcagcggcagccacggtgttcagggtggccggggccagcaccttgttgtcgtgttcagcgattaccaagatagtcatgattagattaccttcgcttcgtttttcagtttctctaccagttcagctaccgacttgaccttgatgcccgcgctgcgtgcagccggtgcttcaactttcacggtcttgttggtagaggcggtggaaacgcccaaagcttccggagtcaacgactcaagcggcttcttcttggctttcatgatgtttggcagggacgcgtagcgcggctcgttcaaacgcaggtcggtggtgacgatggccggcagtttcaaagaaacggtctgcgcgccgccgtcgatttcacgggtgacagcaacgctgtcgccgctcacttcgaccttggaggcgaaggtgccctggccgtaaccggtcagcgcagccagcatctggccagtctggttgttgtcgctgtcgatggcctgtttgccgaggatcaccagctggggctgttccttgtcgacaacggctttgagcagcttggcaacggccagggaggtcagctcttcagcggactcgaccaggatggcgcggtcggcgcccagtgccagggcggtacgcagctgctcttgagcagtggtcgggccgatggaaaccacgacgatttcagtcgccacgcctttctctttcaggcgtacggcttcttccacggcgatttcgcagaaagggttcatcgacatcttgacgttagcgaggtcgacgccggaattgtccgccttgacgcgaactttcacgttgtaatcgacaacgcgtttgacagctacaagaaccttcatggattcctcgttactctccggtgaaaagaaagtcgcctaggcgaacctggcggttgatgctcatcggcacacaagggcacctccaaaaacgcaggcggcgaccttgctcacgggaaatgatgaccgttcgtcaggggtgactgagaggtcattctttatcgcagcgtgtaaactgcgcgccagtgtttgggcacgcgtcacctgtcttgcttttggacgtgctcttgaaacctgctgtctgcctacggtaagcgcaaaaccgaccgtatattgaccggaacgcctattctggtcaatacggcaaaatagccagtcataagccgcaccactttgatttatctagcctgcgagcaattcaaacaaacgtttgtattggacgctgccagtggtgtagatataatgcgccacctagagagaaaggtgggtcttgccgttgccgtaagacgacaccgaacctccacccattagaaaaaaaagcctgttgagccttgagtaggagatagcctgtggaacgcgaatacatggaattcgacgtggtcatcgtcggcgctggcccggcgggactgtctgccgcctgccgactgaagcagaaggccgccgaagccggtaaggaaatcagcgtctgcgtggtcgagaaaggctccgaagtcggcgcgcatatcctctccggtgccgtgttcgaaccacgcgccctgaacgaactgttcccggactggaaagaactcggtgccccgctcaataccccagtggtgcgcgacgacatctatgtactgcgcagccccgaagcctccaccaaggtgcctgacttttttgtgcccaagaccatgcacaatgaaggcaactacatcatctccctgggcaacctgtgccgctggctggcccagcaggccgagaacctgggcgtggaagtctacccaggcttcgccgcccaggaagcgctgttcgacgaaaacggcgtggtgcgcgggatcatcaccggtgacctcggcgtcgaccgcgaaggcaatcccaaagaaggcgtctacaccccaggcatggaactgcgtggcaagtacacgctgttcgccgaaggttgccgtggccatatcggcaagcagctgatccagcgcttcaacctggacagcgacgccgacgcccagcactacggcatcggcctgaaggaaatctgggaaatcgacccggccaaacatcagcctggcctggtggtgcacaccgccggttggccgctggacatcatgagcaacgagaacactggtggctcgttcctctatcacctggaaaacaaccaggtcgttgtgggcctgatcgtcgacctgtcctacagcaacactttcctgtcgccgttcgatgagttccagcgcctcaagcaccacccggtgctggcccagtacctcgaaggcggcaagcgcatcagctacggcgcgcgtgccatctgcaaaggcggcctgaactcgctgccgaagatggtcttcaagggcggcgcgctgatcggttgcgacctcggcaccctgaacttcgccaagatcaagggcagccacaccgcgatgaagtccggcatgctcgccgccgacgccgtggccgaccgcctgttcgctgactccgaaggcggtgacgaactgaccgcttacgtcgacagcttcaagtccagctggctctacgaagaactgttcgccagccgtaacttcggcccggcgatgcacaagttcggcccgatcatcggtgccggcttcaactggttcgaccagaacatcctgggcggcaagatgccgttcaccctgcacgacaccaagccggactacgcctgcctcaagctggccaaggacagcaagaagatcgactacccgaaacccgacggcaagctgagcttcgacaagctgagctcggtattcatctccggcaccaaccatgaagaagaacagccgtgccacttgaagctgaaagacgcgagcatcccgatcggcaccaacctgccgctctacgatgaaccggcgcagcgctactgcccggccggcgtgtatgaagtgatcacccaggaagacggcgaaaagcgcttccagatcaacgcccagaactgcgtgcactgcaagacctgtgacatcaaggacccttcgcagaacatcacctgggttacgccggaaggcgcgggtgggccgacttacccgaatatgtaagctcgcgactcgaacaaaaaggctcccaaatgggagccttttttatgctgcgcgctcttcgccgggattgcgcaggaagtagcgcttgtactcgcgactgaactgcgacgtactctggtaccccacgctgtgcgccgcctgcgccacacccataccgtccaccagcagcaactgttgggccttgagcagacgcagacgcttgaggtactgcaccggcgacaacaacgtgcagcgcttgaagtgctcatgaaaggtcgacgcactcatgtgcgcatacccggccagcgtctcgatattcagcggctcggcatagtgggcatgcaggtgattcaatgacgtggcgatccgcgaaaactgcccctgctgttccaccagtgctcgcaacacatcggcctgcgggccccgcagagcggtgaacaacacttcccggacccgcgccgcgcccatgatccggctttccagcggatcgtgcaggcattgcaacagccgctcgacagcaccgcgcattgcgtcatcgagcatcaccgaactcatcgactccagcgtctgcgccgtgggtggcggcccggcctgaatgcccatggccatgaccaattcgcccaggaccacgcggtcaatgcccaccgtgacaccgtacaacggcgcatcagcgcccatggcaaaggtctcgcactcgaacggcaccggcatggcctggatcaggtaatgcccggcgccatactccaacgtgcgcggccccaggtaggcgactttgctgccttgggccacgaacatcaggcttggctcatagatctgcggcccgcgtgccacgtcacaactggcgcgcagcacttgcacaccgggcaggtgggtcggggaaaaaccgtcgcagggcgtaagcccctcaatcaaggcaaccaaggtggcattggcatcgagatggcgggtcaacaacatggcaaaaaacttcgcgaataagggatgagaacatcatcgcaggtctggcggccaatggatccaaaccaggggcactcccggacgaataggcatgagactcggagcaatcgccatggccgcatcaggacccggcgcggagaatgcgccgcctcacctgtcattgcttttgcgaggtttccccatgtacaccgccatcggttatgccgcccagtcggccaccactcccctcgcccccatgtctttccagcgccgcagcccgcgcgccgatgacgtggccatcgagatcctctactgcggcgtctgccactccgacatccaccaggcgcgcaacgaatggggcatcgccgtgtacccgctgatgccgggccacgagattgtcggcaaggtcaccgccgttggcgccaacgtcaccgcgcacaaaattggcgacctggtcggcgtgggctgcatggtcgattcgtgccgtcactgcgacgcctgcaagtcagaccttgagcaatactgcctcgaaggcccgaccatgacctacgccaccccggaccgtgtagacggcagcaacaccatgggcggttactccgacagcatcgtggtcagcgagcacttcgtggtgaagatcccggccaagctcgatctggccagcgcggcgccgatcctgtgcgccggcattaccacctactcgccgctcaagcactacggcgtgaaggccggcgataaagtcggcgtgctgggcatgggtggcctgggccatatgggcatcaagttcgccaaggccatgggcgcggaagtgacgctgttcacccgctcggcgagcaaggccgaggaaggtcgtcgccagggtgccgaccatgtaatcgtgtccaccgatgccgagcagatgaaagccgccgccggccgtttcgacttcctgctggacaccatcccggtgcagcacgacctgaacccctacctcgacgtgctgcgctttgacggcgtgcatatcctggtcggcctgatcgagccggtcgacccgcccgtcaacgccgccaagctggtgctgggccgcaaagtgctggccggttccttgatcggcggcattgccgaaacccaggaagtcctggatttctgcgccgagcacaacatcacctgcgacatcgaaatgctcgacatccgccatatcaacgaagcctacagccgcatgatcgccggcgatgtgaagtaccgttttgtcatcgacatgacgaccttgaaggcctgatcaggccttcgcgcccaactccgccgacagccgggctgcgacctgtttgaccacgggaatcagctcggccattttctccaagggcatgtagggcacggtactggcgatgctgatgccggcgacgatgcgccggctggcatcgcgcaccggggccgccacgcaacggatcgacggttcgttgtcttccaggtcgaacgcatacccgcccaccacgtattcacgcatgcgctgctcgaactgcgcccaggactgttccgggtgctgcggccactgcaggcttttcccgcccaccggcaggctgacgtcgtacagacgctgccactcttccaccgtgtcatccagcagcaatgccttgccaattccggtgcgcgccagcggcatgcggtggccgactcgcgagcgcatttccgggccattgcggccggggttcttgtgcaggtaaagcacgtcatcgtattcgcgaatggccaggtggatggtgtcaccggtcaatgccgacagctcatccagatacgggatagccaaggtcaccagcggcagctcttcccgcgcctgaaaccccagctcgatcaacttcggccccagcaggtaaccgacttgcggcactacgcgcaggtaacgctcgtccaccaggcaactggccaggcggtgggtggtgctgcgggtggtgccgatgcgcttggcgatctctttcagatcccgcgcacccgccgccacggcctgcaccacgcccaggccgcgcagcagggtctgggtgccggtgggggcggtgtctttgacgggggtgtgggcgttttcctgcatatcaggcctatgtggtggtacgaaaacgagcggcattatggcaaaagctgaacctcaatacagcgcagatccaaatgtgggagggggcttgcccccgatagcggtgtgtcagtgaatgcatgtttttctgacgtgccgccatcgggggcaagccccctcccacatttgaatcttcatagggctcgggatcagcgctgtttcatgcggtcaatgatgaccgccagcaacaggatcgagccacggatgacgtattggtagaaggtgtcgatgttcttcaggttcatcgcattctcgatgatcgccaaaatcaacaccccggcaatcacatggcggatcatgccgatgccgccactcaacgacaccccgcccaacacgcacgccgagatcaccgtcagctcaaagccctgcccaatcatcggctggcccgaggtcatgcgcgaggcgaggatcaccccggccaacgcaccgatcaacccgtgcacggcaaagatgatgatcttggtgcgatcgacgttcaccccggccagcaacgccgcttcctggttaccgccgatggccatggtgttgcgcccgtaggtggtgtagttgagcagccagccgaaaaacacaaagcacagcacggtgatgatgatcggcaccggcacgcccatcaactggccgttgccgaacacgaagaaaccctcatccatcacccccaccgctttgccgttggagaagatgtaggccaggccgcgcacgatctgcatggttgccaacgtcgcgatcaaggcgttgatacgcagcttggcgatgacaataccgttgatcagccccaccaccaggcccatggccaacgccgccgacacaccgagcaccacgctgtcggtatcacggatcacgatacctgcgaccaccccggcacacgcaatcaccgagcccaccgacaagtcgaaatgcccggatgccaggcagaacaacatggtgcacgcggcgatgcccacggtggagatcgccaggcccagcccgcgcatgttcagcggtgaaaggaagttgtcgataaacaacgcgctgagcacaaagatgctcaacgcggcgagcagcatcacccagtcatcgaggaatttgcgctggttgaaacccggccagaagccctttgcagtttttacctcagacatcattcacctcgaattcttcaagcccgcgaacgcgggagagccagttgcaacagccgtgcttcatccgcctggtcacgggcgagttcgccggtcagggcgccttcgctcatcaccaggatgcggtcggaaatccccatcacttccatcaggtcgctggacaccacaatcaccgcaataccgctggccgccaggttatggatgatctggtagatctccgacttggcaccaatatcgatgccacgcgttggctcatccagcagcagtactttcatcggcatcgacaaccagcggccgagaatggccttctgctggttgccgccggacaggtacatgattttctgttcggcgttcggcgtcttgaccttcatgcttttgatttgccggtctgcgttggccttttcccagccatcacgcagcagccagccaaatgcagagtgggcgccacgcgcgctgatattgatattttcggcgacgctggacagcggaatgatgccttccttcttgcggtcttccgggcacagcagtacgccggcggcgatggcatcgcgcggtgaacgcagttgcagggcctgaccgcacagttccaggctgccggcagtgctgcgggtcaaaccactcagcagccgaaacagctccgtgcgccctgccccgaccaagccgaacaggccgagaatctcgcccttgtgtacctgaaggctgaccggctcacgcaagcccgggccaagcaagccctcgaccttcagcgctacatcgccctgttcacgtgggcggtagtcgtagatgtcctggatatcgcggccgaccatgcacgttaccaactggtcgtgggtcagggtgctcatgtcgtcgaaggtgcgcacgtaacggccgtccttgaacaccgttaccgcgttgcagatgcggaacacttcctccatgcgatgggacacgtagagcaccactttgccttcatcgcgcagccgcgtgatgatcgccatcaagcgatcgatctcccgcgccgacaggctgctggtgggctcgtcgaaggcaatcacatgggcgccacgggacagcgccttggcgatttccaccagttggcgttgaccaagggaaagtcgaccgagcttctcatccggatcgatttcatccgccaggcccttgaggcaggccaacgcctgcttacgcaactgactgcggttgaccaccccgaagcgcgtcggcaagtgcccaaggaacaggttctcggccacggtcatttccggcaccaagtgcagctcctggtggatcaccgccacgccgttggcaatgctgtcggcggcagacttgaagtccatggtctgcgcgccgatctgcaacgtgccactgctgggcaggtaggcgccgccaaggattttcagcagcgtcgacttgcccgcgccgttctcgcccatcaacgcatgcacctcacgcggccgcgcttcaaagctgatctgcgccagggctttcacaccgggaaactccttgccgatgccgttgaagcgcaaggccgcgccggtcatttccacaacccgatcttggtcagctctgcctggaagttggcgcgggtgatcagggtcacttcgtccatcgccgtgtatttcgcaggttccttgccggtggtgacccactcatacatcgccaacgcggtgttgtaaccctcgatatgcgggctgggcagcatcgagccgaagaaaccgctttcagcctttttcaactcgccgatggcgtcggtgccattgatgccgatgccgatcacattggcagccttgaagccggcgctttcggtggcgcgtacgccgccgagcacggtgttgtcattcatgccgccgatgatcaggtttttcgcgccgctgggcagcttgaccagcgccgagttggtggcgtccatgctgccgggtacgtcaagggtcttgagcgcggcggtcaggatatggtctttgggcaggccggcgtcttccagggacttgatcgaaccgtcggtgcgcttcttgccggtgtcgagttcgttataggtgttgatcacggcgtaggtgtccttccagtcccagccgcgttttttcgcttcggttgccattgcggcgccctgcttctggcccacttcaaaggcagccatgcccaggtacggcacgtcttccatgaagttgcccttcgcatccacgaagcgatcatccactgccatgactttcaggccattgaccttggccttggcgacgatggccgggccgagggacacgtccggcgggcagatcacaaagcccttggcgccgttggcagccaggctgtcgatggccgagagggttttttcaccgtcgggcacggcgatcttgatcacggtaaagccgtgttccttgccggctttctcggcgaaggcccattcggtctggaaccagggttcttcggcctgtttgaccagaaagccgatcttcacttcttcggcgagtgccacgctgctgaacgccattgcaagtgccagggtgcctaaagtcttcttgaacatgaaccacctctttcttgttattggaaaacgcttcagtcgtggtacatcactgaccgcccgccatcgatcatcaggcaggttgcattgataaacggcgcctcgtcggtcgccaggaacaacgcggtcatcgccacttcgatcggctggccgatgcgcttgggcgggtgcaggtcgaacgcacgctggcgttcggcgtgggggtcggggaaaccgttccagtagtcgacgttgagctgggtttctatgtagcccggcgcgatggcattcacgcggatgcccttgggcgcgtattcgatgccgagggcgcgggtcaggccaagcaggccatgcttggccacgggataggggaagcagccaggaatgatgtggctggaatgggtggaagcaatgttgatgatattgccgatgccctgctcgatcatgtgcggcagcaccgtgcggcagccgtaccaggcaccgtcgaggtcgatggcgaagcagcggcgccagtcttcgtcggtcatctccagcgggtcgcgaaacacattgaccccggcgcaattgaccagcacatccacccggccgaagcgctcgatggccacattgaccagtgcctgccattgttccttggacgtgatatcgacggattgcgcgtagatcttggcgccgtgttcgcgccagcgggccgcgacctgctcgaccttttcgccctggatatcagcgatgatcagcttcgcctgctgcgcctggaaacacgcgacgatcgcctcgccaatgccttgggcggcaccggtgatgatcaccactttgcctttgagccgctcgccgtaggtgggttcgggcacggcggggagtgacaacggttgtgcctgcatcgcttcacctgttttatttttggtagtgagtgctgatgcagccgactataaacccatcttttgaaacatctcaatatataaatttgcatcccatatattgagaaaagagcaaaaaaattgtgggagggggcaagccccctcccacattttgatctacggtctttagcctagggcgaagtcacgcagcgcatcaccttccatgcgatagcgcacccactcctcctgcggctgggcaccgatggatttgtagaacgcaatcgccggttcgttccagtccagcacgctccactcgaagcgcccgcagccgttgtcgaacgcgatcttcgctaggtggcgcaagagcttcttgcccgcgccgccgccgcgttgctccgggttgatgtacaggtcttccaggtacaggcagttgctgcccagccaagtggaataactgaagaagaacaccgcaaaaccaatcggcaggccatcgcgcaaacagatcaggccatgggcggtcgccccttcgctgaacaggctacgctcgatgtccaccacactggcgatcacttcatgccgggccttctcgtactcggccaactcagtgatgaaagtcaggatctgcgcagcatcgctgggcacggcggggcgaatctcgatggtcatgggcgagccttggcaatttcaaagcacacatactaaggcgctttcgtgacgagttgcagcgcaattcgtggtcactggcacacaaaatcttacaggtgacgcaagaccgttcgtcgccacccaggcacgaacatcaaacgagagctgaccaacagtaggtaaggacattcatcatatggagacaccctcatgaagcattccaagtttgctgccctcgccctggctggcctgttgtcttcggtttcgctgagcggttttgcggccacctcctccaccggcccgaccaacccggacgccaccaccgagtcccagaaatccatgggcaccggcctggacaccaatggcggcgcagtcattgacaataccaatgccgctgacccgcacacccagggccatgacacccaacgccaggcaccagctgccgtcggcaacggcaaaatgggcccatcggtcaatgaacccaagatcaacaagggcgatgactcgaacctgcccggcgcgccaaaacagcctgcgccttgatccacccaacgcaagacgaacacccgatcatttcccagtgaagaggtacgcatgaacgtcgacaaagaccttgagaaagaagtcttgacccgcctgctgcacgctcatccccaggggctgggcaaggaggtgttggataactaccgcggagaaaaagtcgtcgccagtgcgttggcgtttctgcaggatcgcggcctgatcaaggatgggcatgtgaccaccgacgccgccggtgaatatgcgttgaacctgccgatcaagctgacggcgtcgggtgtggatgaggcgcgtaagttggagtctgaaaccagccagtagcctcaaatgtgggagggggctttcccgctcccacattttttgacacggcctattcccggagaaaggcgtcgacttctgcgctgccaggcgatgtagccggcccccagcgagtcaccgccagcgccgctgccgcgttcgcccggcgtgcagcctgggcaggtgccaggccatcggccaaccctgcgataaacaccccggcatgggcatccccagcgccattgctgtccaccgccgtcaccttcaaccccggcacatgctcggcctggccattgcggctcacccagcagccattcggcccatcccgcaccaccagcaaggcatcgccgggcagatgacgattcaagtcgaccagcgcctctgcaaccgtttccgccccggtaaacgccagtgcttcagggccattactggtccagatatcgatacgcggcaacagcgccaccatcagcgccgaatccggtgccttcaccaacggacccgggtcgaacaccaccttgatagcgcgaggcagcgccagcaaccagtcgagcagagcctgcgccttgccttccagcaacaggctgtagccactcacatacacgtaatcgtccggctgcgggaccacgcgcgccaggtcctcggcgctcaactcgccttcagcaccgatatgggaaatgaaggtgcgttcggtggtggcctcggtcagcgacacacacaaaccggtatctttatccgtgctggccgcttgggcaatctcgacaccttccgcctgcatcgccgcgcgtgccaggtcgccgaaacgcccgttgccgtgacggcccaggtagaccaccgccagcccattgcgccgtgcggccgccatcacattgaagccaccgccggcttcgaaactggccgattgcgccagcacgtcgccaccggttgcgggcaaggtatcgagggccatgaccaggtcgacgatgacctggccggtgtgcagcaatctagacattagggctctctactaaagccgggcgacgatcagccgcaccgcccagtactgcataaatcccgccggccaccagaaaggtgacgatccagcccaggccgttgtggcccagccaggagtcggacaaaggcccggcgaaccagatgttctcggcggtggtgccgatggcggtgaagctgaaacccagcacgatcgccacggcccaggcaccgaaggcacgccactccacaccgccgcgataccagtaggcgctgcttgggctcacgtccagcaggtccttggcgctgtagtagtgacggtggatcaggtcgaccacgaagatgccgacccatgccgtgatcggcaccgccagcaaagaaatgaacgtgatgaacgggccgtagaaactgtcggcgatcagcatgaagtaaatcgaaccggcgaagatcgccacgatatcgacgatcaccgcatgcacgcgcttgaccttcaaaccgagggtcagggtggtgaggcccgccgagtacaccgataggttgttggacagcagtaacccgccgaacgcggtgatcaggtacggcacggccatccaggtcggcaacatatcgcggatcgcgatgatcgggtcggtcgccgacgccaggtcattgttgcccaccgacagcaggccgccgagggtgatcaacagcaccagcggaatgcccgcaccgaacgccgccgacgccaccaggcgcacggccttgacgctgcggtgctggtagcgcgacatatccgcgccggcgttggcccagccgataccggtgccggccgccatggtgccgacgccgatgatcatcgcgctcagcggtgccggggtggcgttgaacaccgcgctccaatcgatggtggcgcagaggaaaccgccgaccaggatgttcaacgcgccgaacacataggtggcccacttctggatcaccagcaaggtggcgtggcccaggccggacaccgacaaggtcaacagcacgaagatggcgatgaagaccagggtgagcaccggcgcgcttttggcttcgaccggcgaaccgaacaggatcgagcacaacgacagcagcacaaaggcggcggtagtggtgttgacggtttcccagcccaggcgcgacatcagcgacaccagggtcggcccgatattgccgcgcacgccgaagatggcgcgggacagggtcaggctgggcgcacggccacgacggccggcgatagaaatgatgcccaccaccgcaaaggagccggcggcgccgaggatcgcaacgatgatggcctgccagatcgccaggccgcgaaacgcgaccagggtggcgccgagcggcaagccgaggatgctgatattggccgcgaaccacacccagaacagttgcagcgggtggccattgcactcgccttcaggaaccggttcgatgccgcgtgtttccaattgcccggcgctttggccggaagatgtgctgctcatgagagggtgctccaagtgcctgtattgttgtggttgtggcaggtatacaaagcgaatcttccggtcgtcctgactcagcgcattttcaacaattcttcaaccagcgactgcagatccaggccattgacctgcttgacctgttcgatcagcgcctcaggccagcactgcatgcccaggcacgcaccgagcatggcgccgagaatcgcggcgatggtgtcagtgtcaccgccaagactggccgccaggcacagcgcctcgaaagcactcatctcgcccaccgccacttgctgggccagggcgaacgacaccaccaccgactcctgggacgcgacggaggtgccgatcaattcgtacagcaggtcggcgaacagggccttgtcgccgctgccgacgctcaaggtccgcgcccagctgatgcgcgtggacatccgcccacccgcgatccagtgaccatggccttcggcctgctgggcaacctgggtgccgatgttcaacgcttcgcccaggtccacaccgttgattccggctgataccaccgccgccaccgccgccgcgctggaaatacccagggtggtgttatgggtgacctggcaggcctggattaccgcctggataaactgcgccgggtcgctgacatcggcggcaatccccactggcgtgatgcgcatcgcggcgccgttggtggtgccgtaacgtccggattcttccggggtgtggccggcgaggatcatgtcgatcgcacgcttggtggaggggccgagcaaatcctgggaacccttggcgcgcatcaccgcttcccagtcgatcaggcgctgggcaagcacagtgggttcgatcttgcctcggccttgcacgagtaactcacccaccaggatggcctgttcggtgtcatcggtgatggagccggcgggcatgttaggtgcgatgggctggtcggcgtcggcgtgttccaggccggtgatggcaccgaaacgcgcgcgcacctgttcgcggctcagggactgggtcggcatgcccagggcatcgcccaaggccaagccgtagaaggcgccgagggcgcgattgagcggggtcatttcgagtttccaaattgcaggtgcaggcgaaagtgcagaggatcgagcaagctttcgacgtactccatgaaacgctcgcgacggtcgtaggtggtgcgcgaggccttgaggaacaccgtgccggctgggcggccaagcaactcggcatcttcatcgctgaggggctctgcaccgatccattggtcgccttcggcgccgacataaccgtaggcagccagggtaatggtcagggaatcatcgatcaggccgactctcggcaggccctccaggcctccggaagcgggcatcagcgagcgttccagggacacggcagtgccgtcagtggtgcgacggcgacggtcgagggcaatgaattggtcgctgccaaaacggctgaacaggtccgggcgggtcaccgcttccaggcgcaggatatcggtgttgaccttcgcaccggtgtccgccagggcttgggcccagccactgcgctggtcgagcaccatgccgtcaaaagtgacgatggagccgacgccgctctgggtcgcaatgtagttacgccgcttgagttcagcgagggcctcacgcagggtgccgcggctgaccgcgaactcttcggccaactgatgctcgcccggcagcaggaaaccgtcggccatcaccccaccctcgatacggcggatgagttcgtcgacgacgcgttttttcttatcaaatcgaacatgtctaatcatgtacaaattgataacgcaaagcgcccatgtgcagcaagcgaattatttcagggagatgataaaaccggcctcagggctccaggccaatagggaaaaactcccctgcgctccagacgcccagccagttctgaccgttgatcggacggctcactgccaactccaccaattggtagaacgcattgcggtgcaccagggcttcgaggttgctgcgcactcgcagatagggagcaggctcctgggtcacagggtcgatcaccacccgcagcgggtgttcgaggccggcttcgacctggtcatcgacattggtggtgaagcgcagcacctggctttcgccctgcccttcgacttccagggtaatggcgacaaacggcgcatcatcgacggtgatgccgactttttctacaggcgtaatcaggaagtaatcatcgccgtcgcggcggatgatgttggagaacagcttgaccatcggcatgcgcccgatcggcgtgccctggtagaaccaggtgccatcacgggcgatgcgcatgtcgatgttgccgcagaagtccgggttccacaggtgcaccggcgccggtcccttgcctttgggcagttgggccaacaggtcgttggccttggcggaatcggtcatggggttctcctgggtcttatggattgctcatccccaacaggccacgggcgtactgcgccagggggcgggcaatcaggtcttgtggcttgttgtcgtgaaacgtcagtaaaccgccacgactgcgtatacgtgcagtatcaatcaaatactgggtgctggtctcgatcaacatgatctggatgacgccgctgtccaggcctacgcggtcgagggcttcctggtcggcccattcatccgcgttgccgatgcggtcatccgccttggcgaaacggcagtacagcaggtagtgagcccccgccgcacgggcttcggccatggcctgctccagtccttcgggttgacgggcgcggcgcaccatggggaagtactcgacaaaaccattgaaggcttcttcggccaccacgttcggccgcggataggcactgcccggcggcacaaaggcgccctgggcgataaagacgaaggagtccggctgtatgcgtaccgaggcggtacggcgggtatcgctgtggtcgagcaaaccggcgtcgctcatctgatagcgggtgccttcggccatatcgctgacggtcatgcagccactcagcgtcaacgacgccagcaacaaaaccagactacgcatcctaatcctccagaagccggtgacggaaaaccggcgaatgggcgtgtgatgcaggttctgcgccatttggtagcaacctacaacaaatgtgggagggggcttgcccccgatannnnnnnnnnnnnnnnnnnnnnnnnnnnnnnnnnnnnnntatcgggggcaagccccctcccacatttggttttgtgctgtctgagcgggttggttagccgccgatgatcttcatgatggttgcaccgcccgagaaggccacttcctgtttgtcgcccagggctttcatcaacaggccttgcaacgccggcagcgcttgatggcgcggcttgtccagcaggtcgccgacgtagtggcggttactcgacgacaggcagccatgcagccagccagtggacgacaagcgcaaccgcgagcaggtgcggcagaacggcacgctttcgttggcgatcacaccaaagaaacccttgcccggcacttcgtagcgtacggccgtggcgtccacgggggcgttggcttgcaggtattcatactgttcgccgatcaggcccagcagttgttgcaggctgacaaactgctgcaggaaggcgttggagtccttggccaagtggcccatgcgcatcaactcgataaagcgcaactcgtagccacgctccaggcagtagtcgagcagcggcatgacctggtcgaggttctggccgcgtaacggcaccatattgaccttgatcttgatcccggcagcgcgggcctggtccatgccgtcaagcaccgtggccaggtcgccaccacgggcgatactacggaaggcatccgcatccagggtgtcgagggacacgttgatgcgcttgatcccggcttccaccagcagcggcagcttgcgcgccagcagttggccgttggtggtcaggctgatatcgctgagacccatcccccccacggcgcccatgaaagcttccagcttggggctgaccagcggctcaccgccggtgatgcgcaggcggtcgatgcccgccgcttcgatcaggtattccacaccacgggccatagcctcggccgagagttcgtcctgggcagccaccagccgcttgccgttgggcacgcagtaggtacacgcgtaattgcaggctgaggtcaggctgatccgcaaattgcgaaaacgcctgccttgacgatcaacgatcatggatcactccggcagaggatgaatcgggcgcgctaaaagctgactgataaatcagcttttagcaagcgtccttgcctgagtatattcctggggtactgcgcgtggcagcaaatcattacgtggcaggcgtttgggccggcgccgcttcaatcgccggcggctcactgctgtgcttgcgcttgttgcccatgcgcacgccgatatccatcaaaaactggaagaaaccttcctgatcttccagcacgttgctccagaacggcgagtggtacagcgccacggcaccgtgcaccagggcccaggcggcgcagtagtggaaatacggcggcacatcttcaagcttgccttcactgatacggcccttgatcagcagggtcaggcgttcgaagttcgaggcgcggatcttgtgcagttcctcgaccatctccggcacctgatggcccttgaccaccttctcttccagccggtcgaacaggcgatagcgctgcgggtcacgcatgcggaactcgaagtaggcacgggacagggcttccttgtccttgtcgacgtcggccgaatgcagcagctcgttcaagtcgcgctcgtagtcgagcataaggcgcaggtagatctcggccttggacttgaagtgcttgtagatcgtgcctttgccgatacccacggcatccgcgatcatctcgacggtgacgctgtcttcaccttgttcaagaaacagcttgagtgcggtgtcgagaatttcctgctcacggcggcgaaactcacggaccttacggggttctttgtgcatgaggaagaggtctgcaaaggtcggattagggagggttgcgcagggccacggatacgtggcgatacgatttacccggtgcgagggattatcccgactgaacggtcgttgggcaatgtctatgtgaacccgtaacgcactttactttcagcgcgccaacgttttcattgatatcagtcagaaataatacgcaacaactacacccgtacaccggactgatgagaactcaagcgaagcgcgcgtattccaaatctgtttaaaaaacgatcagtcgcgactggactgaatcggatactgatcaatacttgaactgtcggcgtgacatctcccccaagtgaagcgccgacctgggtaccaacggaccgcgtacccttgttttactcctaatggtcttaacccggattcaccccccagaacccgggttttttttgcctgcgatttgaccttcgcgttaagaggcgacgtgggccagcgggaacaggcgcttgaagttttcggtggtctgctcggcaaaacgctcgtaggactcaccgcgcagcatcgccaggtaatccgccacgtcgcgcacatactccggcaggttcggcttgccgcgatgggggataggcgccaggtacggcgaatcggtttccaccagcaggcgatcggcgggcacttggcgtgcgacatcacgcagggcgtcggcgttgcggaaggtgacgatacccgacagggaaatatagaaccccaggtccagcgccgccttggccatgtcccagtcttcagtgaagcaatgcaacacgccggcctggggcaatgctgcttcgcgtagcagggtcagggtgtcggcacgggcgccacgggtgtggacgatcaccggtttaccggtctgccgggcggcttgcaggtgcaggcggaacgaagcctgctgcaactcggcggcttcgggttcgtagtggtaatccaggccggtctcgccgatggccaccacgcgcgggtgattgagctcacccagcagccagtcgagtgccggggcttcaccgggcttgaggtccagcgggtggatacccaccgagcaatccacatcggcataacgctcggccagggctttgacgtccgccgcattctccgcgctgacgccgatgcacaggaagtgccctaccccacgctggcgggcggcgtcgagggcagcgtcaagggagccgccgtgctgggccaggtcgagacgatcaaggtggcagtgggaatctacaatcataggcatctacaacttcagtcacgaaaagtgtctggccgacgatacacccgccggccacggaaattaacggcgtccgagcaaaccgacccactgcaccagcaacgcttcgagcagcagcacgcggttgaggttggccttgccgagcaccttctggcgctgggcgaggatccagtcctgaatcgtcagcaccttgtcctgggcacttttctgcgccaggtattgcaccaccttgcgcatatccggcaggcccaggccgttttcatcctgggtcagctggtagcgcaagatcaggctcgaccaatcgcagaaccagtcgaacagcaacagcagggggatgtccttccaggcgttttctgccaactgggtggcggacacttcctgcttgatcagtttcttgaccccctccaccaccagcgcacgttgttcacgcacgccctgggcctgcagcttcacggcggccaacggcgaaccggcggccagggtcagcagctcgacccgttcctcctgggagcactccggcaacgcctgcgccagccacgcaaggctcatggcctcgcttggcagcgggcaggcctgctgcacgcagcggctgcggatggtgggcaacaaccggctcgattggtggctgaccaacaacagcacggtatcgccggacggctcctccaggcttttgagcaaggcgttggcagcattgacgttcatcgcctccaccggctcgatcagcaccaccttgcgcccgcccatctgtgcggtctgcaccacgaagctgaccaggtcgcgcacctggtcgaccttgattgccttgtcggcctcttcgggctccagcaggtagttatccgggtggctgccggccttgagcagcaggcaggatttgcactcgccgcaggcttcaagcttgaccgggcgctggcacagcaggctggccatcaggcgctcggccaacgctcgcttgccgatccccaccggcccatgcaataggtaggcgtgggcgtgctgggcacggccggccagttgttgccacaggctgtcctgccacgggtaggcttcagccacgggcgcgctccagcagtttgggtagcagcgcgtcgatggcttgctgcacctgcgccagcggttgggctgcatccagcagggaataccgcgcgggctcagccttggcccgtgtgaggaatgcactgcgtaccgcgttgaagaacccatcgccttccagttcgaagcggtccagacggccacgagcactggcgcgggccatgccgacttccaccggcagatcgaacagcagggtcaggtcagggcgcaagtcgccctggacaaaggtttccagggtggcgatgcgctccacggacaagccccgaccgccgccctggtaggcataggtggaatcggtgaaccgatcgcagatcaccacggcaccacgggccagggctggacggatcacctcggcaatgtgctgggcacgggcggcgaacaccagcagcagctcggtgtccgggttcatctgctcgtcacccggcgccagcagcacttcgcggatacgctcggccagcggcgtgccaccgggctcgcgggtcaacaccacctcgatgccttcgctgcgcaagcgctcggccagataatcgcggttggtgcttttgccggcgccttcggggccttccagggtaataaacaagccagtcacaggcagtccttagtcagaattattgcgggctttgcggcgcgggttcagctggcgtatcagcaggcacatccgccggtggtgttgcgtcttcggcaggcttcaccaccggcgccgggctggagcggtaatcggcgcgccgcttgagttggaactcacgcacggcggcattatgcgcatccaggttatcggagaaaatgtggctgccgtcgccacgggcgacgaaatacaggctgctgcccggcaccgggttcagcgcggcatggatcgcctcgcggccgaccatggcgatgggcgtcggcggcaggccggcaaccatgtaggtgttgtaggggttggcttccttgaggtgcgcgcgggtcaacttgccgttgtagcgctcgcccaggccgtagatcaccgtcgggtcggtctgcagcaacatgccgatcttcaggcgccgtacaaataccccggcaatctgcccacgctcttcaggcacgcctgtctctttctccaccagggaggccatgatcagcgcttggtaagggtcggtgtaaggcgcgtcggcagcgcgcttgctccactcctgggcgagcacgtcgtccaggcggttgtaggctttcttcaggaattcgacgtcggtcataccgcgcacgaaacggtaggtatcggggaagaaccgcccttctggaaacacgccagggtgaccgagcttctccatgacttcgctgtcactcaggcccgagagggtctgcacgatcttttcatgcttggccagcgccgagcgtacctggcggaagttccagccctcaaccagagtcaggctgtattgcaccacttcgccacgctgccacaggccgatcaggccctgcgccgtcatgccgggcgtcatgcggtattcgccgctgtgcaatggctggccgtccaggttgaagcgccagtacaggcgcaaccagaaggcaccgtccagtacgccgtcagcttccaggcgattgaaggtgccggtgggggtcgcccctgccggtacgtcgagcaattgctcctgggtcaggttcaagggctgcttcagggcagcgtcgtatttccaggcgccatagcccaacagcaaagccgccgagaacagaccgaccagcagcagtacaaccagttttcgtatcaactcagatttccaatagcgcgcgaacaatgccctgcagtttacgggtgagcgggccaaccgaccagctcatcgcagcgcactcgcgcaccggccaaatgccataaacgctgttacacacgaagacttcgtcggcttgctgcaactgctcaatactgatgtcggccacggccaccgggacgcccagggtctgtgcctgggccagaatctcggcacgcatcaccccggccacgccgcaacgcgtcagatcagcggttagtaacaagccattgcgcaccaggaacaggttgctgaatacgccttcgatcacgcgaccggacacatccagcatcaacccttcagcgtgctcggcgtcctgccattcggcacgggcgatcacctgttccaggcgattgaggtgcttgagaccggccagcaacggctgttcggccaagcgggtggcacagggaaacaggcggatgccatcggttccatgagcgctgggataagtagcaggcgggctgccctgcaagatacggcgcaccggtgcgccagggttgatgccataaccgcgcaggctgtcgccacgggtcaggatcaatttgaggacaccctcgccaagggcggtggcgtaggccagcacttcgctgcggatcaacaccggatccgcaaccaaggcgaggcgcctgcaaccctcgtcgaggcgttgcaggtgacggtcgagcagcaccggctgcccggcctttacggcgatggtctcgaacaacccatcgccatacgccaggccgcgatctttcaggggcacgctgtccgctggctgaccgtcgacccagctgtgcatcactcggcgaaccggcggaacaccagggaaccgttggtgccgccaaaaccgaacgaattggagatcaccacgtcgatcggcatcggctgcgcttcgtgtggcacgaagttcaggtcgcagccttcgtcaggctcatccaggttgatggtcggcggcgcgacctgatccttgatggccatcacactgaagatcgcctcgaccgcgcccgccgcacccaacaggtgaccggtcatggacttggtagagctgaccgccagcttgtaggcgtgctcgccgaataccgactttatggcctcggcttccgccagatcgcccgtcggagtcgaagtaccatgggcgttgatgtactgcacctggtccgcattgaccttcgcatcgcgcagggcgttggtgatgcaacgcgcagcaccggcaccgtcggacggcggcgaggtcatgtggtaggcgtcaccgctcatgccaaagccaatcagctcggcgtagatagtggcaccacgcgccttggcgtgttccaactcttccagcaccagggcgccggcaccgtcggagagtacaaagccatcacggcctttgtcccatggacggctggcgcgggtcggctcgtcgttacgcgtcgacagcgcacgggacgcgccgaagccgcccatgccgaggccgcacgccgccatctcggcgcccccggcgatcatcacgtcggcttcgtcataggcgatattgcgcgccgccatgccaatgcaatgcgtgccggtggtgcacgccgtggcgatggcgtagttaggtccctgtgcgcccaggtggatggacaggaaaccggaaatcatattgatgatcgagcccgggacgaagaacggtgaaattcgacgggggccggaatcgtgcaacgtgcggctggtttcttcgatattggtcaaaccgccaatacccgaacccatggccacgccgatacgatcacggttggcgtcggtgacttccaggccggcattgcgtaccgcctgaaaaccggctgccaggccgtattgaatgaacaggtcgagtttgcgggattccttgaccgagagatattcctcgacattgaaaccctttaccgagccgccaaaacgggtggaataggcagaaaggtccgtgtgttcgatcagaccaataccactgcggccagccagaatgccctgccaactgcttggcacatccgtgcccagtggcgacaacatacccataccggtgactacgacgcgtctacgcgacacagcactctcctttttctaatgacgacacttttgcttcagcgcgtacttttcatcagggctaaagaaaaaaccgcacgccgttacagcagtgcggtttttccctgacagcaagcgacgactacaaactattacgcctggtggctagtaacgtagtcgatagcagcttgaacagtagtgattttttcagcttcttcgtccgggatttcggtctcgaattcctcttccagagccatcaccagctcaacggtgtcaagggaatcggcacccaggtcttctacgaaggaagcagtgttgaccacttcttcttctttaacgcccagttgctcggcgacgattttcttgacgcgctcttcgatggtgctcataccttgtttaactcctaatggacaaattcaggcagctggccagtgggtaagtgtatagaaagccttttcagcttttcaactgaaagcttcaccctgtacccggtcggccacctgcctataaattaagttgcagctttataacggattttagacagctcgtatgacatatttttgaagcgatccgtcacaatttaactcatgtacatcccgccgttcaccgggattgtagccccagtcacgtatgccgcaccgtcggatgccaggaaagtgaccacattcgcgatctcttgagcctgacccagacggcccagcggaatctgcgtcagcaacgcttcacgctgtgcttccggcagttcgcgggtcatatcggtgtcgatgaacccaggggccaccgagttgaccgtaatcgaccgcgagccgacttcacgagccaatgcacggctgaaaccttccagaccggccttggcggctgcgtagtttacttggcctgcgttgcccatggcacccactacggagccaatattgataattcggccccaacgcgccttggtcatgccgcgcaaaacgcccttggacaggcgaaacagactgttcaagttggtgtcgaccacgtcgtaccactcgtcgtctttcatgcgcatcatcaggttgtcacgggtgatgccggcgttattcaccagaatcgccggcgcgccgaactgtgcggtgatctcggccagtacggcagccacggactcatcgctggtcacgttcagctcaaggccggtgccttgcacgccgttttccttcagggtcgcggcgatacgctcggcgcccgaggcggaagtggcggtgccgatcacaacggcgccctgacggcccagctccagggcgatcgcctggccaatgccacggcttgcgccggtgaccagtgcaactttaccttgcagactcatgcaggcttctcctacgttcagggattcaggccagtgccgcgcgagcggcagcaaaggcgtcaggggtattgaggttggcagtcgacacgccgtcggcgcagcgcttgttcaggccggccaggactttgcccggaccacactcaaccagctcagtcgcaccattggcggccagggtctggaccgattcaacccagcgtaccggcttgtagagctgttccagcaggtcgctcttgagggtatcgaggtcagcagccacggcggcgctgacgttctgcaccagcgggatctgcggcgcctgccagttgatggcggcgatggactcggcaaaacgctcggcagccgggcgcatcagctcgcagtgcgacggtacgctcaccggcaacggcaacgcgcgcttggcaccacgggccttgcagccttcgatggcacgctcaacggcagccttggcaccggcaatcaccacctggccaggggagttgaagtttaccgcgctgaccacttcgccctgggccgcttcggcacaggcctcgatcaccacagcgtcgtccaggcccaggattgcggccatgccgccctgcccggccggaacggcttcttgcatcaattggccgcgacgctccaccagcttgaccgcctcacccaaggtcaggctacccgccgcaaccagggcgctgtattcgcccaggctgtggccggcgacgaatgcagggcgtgcgccgccttccgccagccacaagcgccacagggcgatcgaagcggtcaggatggccggctgggttttatcggtttgattgagttgctcttccggcccttgttgggtcagtgcccacaggtcgtaacccagggcgtcggaagcttccttgaaggtgtccagaatcagcgggtattgcgcgctcagctcggccaacatgccgagggactgcgaaccctgccctggaaagacgaatgcgagggatgtagacatgtaacaagcccctaatgatctggtcgtcaaaaaagcgcactcctacagtgggagcgcacgaaactgacagattggatggtcaattgaactggccggtcacatttaagcactcccgggccgattcgcctaaggcaacaggtcctcgagacggccatgcaagcgttgcggcaggttttcctgaatctcgatcacagcccgcgcgatcgcactttgaaacccctcgacaccggccgagccgtggctttttactacaatgccctgcaaccccagaaaactcgcgccattatgccgtgccggggccaggtccgcctgcaggcggcgcatcagcggcagcgccagggcaccaaccaggcgcgacgccaagctctgcttgaacagcgcttcgatacgcgtggcgatcatggtcgccaggccttcgctggatttgagcaggatattgccgacaaacccgtcacacaccaccacgtccgcttcgccacggtacaagccgtcaccttcgacaaacccgacgtaattcaacccccgcgcgccttgcagcaacgtggcggccagcttgacctgctggttgcccttgatgtcttcggtgccgatattcagcaaggccacccgtggccgggccacgcccagcgcttcggcggccaccgagcccatcacggcaaactggagcagatgctcggcgctgcaatcgacgtttgcgcccaggtccagcaactggcaatagcctttctgcgtcggaatcgccgccaccatcgcgggccggtcaatgccgggcagcgtcttgagcacaaaccgcgacaacgccatcagggccccggtattgccggcgctgacacaggcttgcaccttgccatcacgcagcagctccagggccacccgcatcgaagagtcaggcttgccacgcagggcggccgccggcttttcatccatggtgatggtttcgctggctggcgtaatcgtcaggcgcgcgcgatccaccgccggatggctggcaatcagttcttcaagtaaggagggttgaccgacaagggtcaggtgcagcgagggtgttgcagacaggctggcaatgcaggcctgaacaatgctgcggggaccgaagtccccgcccattgcgtctatcgcgatgactagagcagacaagtgattactcgtcagcgcccttgtcgatcactttacggccacggtatacgccttctggcgatacgtggtgacgcaggtgaacttcaccggtggtcttttccacggacagggtgctagcctcgagagcgtcgtgcgaacggcgcatgtcacgggcggagcgggattttttgttctgctgaacagccataattgattaactcctaaacgtttgggtcacgctttaactgcgccaatacactgaacgggttggaccgcgttacctcgtcctcgctcggttcgggctcgtcatcgaggcccgccggctgctggcattcttccggatgatgagcaggcacaatgggcaaggcgagcagaagctcctcctcgatcagtgcatgcagatccaaaggatcttcgcccagttccagcacgtcataacctttcggcaacgactgggtattcgcaccctccttcaccacagcataactgcactcgctgtggatcggcagggtgaccagctcaagacaacgctggcaaaccattttgacctcggtgtcgataaaactgtggattaccacagatttacgttcatctcgttcaaaaacgaatttggcctgcaccgtaccgacagtgtcggaaagcgggtcgcagagtctctccaaatcggccagcagcaactcaccttgaagggaagtgccacgatcagccaatttgcgcgggtcaacgtgaggtggaatcgggtcattcaacataggcgcagcattatagggatgcacccagccatgtcaaaggaaattcagccctgtgcgtcagccggtcgccccgctagaatccgctgccgacctgaggagacgcccatgctgcccttattactcgcatccagctcggtgtatcgccgggaattgctgagccgcctgcacctgccgttcatctgcagctcgccggatatcgatgaaagccaccgcgcaaatgagtccgccatcgaactggtcaagcgcctggccgaacagaaagcccgcgcccttgccgccagccatccggggtatttgattatcggctccgaccaggttgcagcgctcgacggacggatcatcggcaagccgcacaccttcgaaaacgcccgcgagcaactgctggccgccagcggcaagcgcgtcagttttctcactgggctggcgctgctgaacagcgagacaggcagctgccaggtcgactgcgtgccttttacagtgcacatgcgtgagttggatgccgagtgcatcgagcgttacctgcgaattgagcaaccgtatgactgcgcgggcagcttcaaggccgaggggttgggcgtgagcctgttccaaaataccgaagggccggacgccaccagcctcatcggccttcccctcattcgcctggtggatatgctgctggccgaaggcgtgcaaattccctgagaacaccacaagcaaatgcgggagggggcttgcccccgatagcagaggatcagccaactaacccgcagctgacccaccgcaatcgggggcgagccccctcccacattttgatctatatgtagcctggggctcagcgcaggcttgggccttggaagcccatgtaaaaggccagcttctccgccacgctggcaccgagccgcttggagaaacgatcaaacggcgattcctcaaccgtgaaatccaccagttccttctcgccaatcacatcccgcgctaccgaactggcactgcccaggccgtcgatcaagcccagcggcaaggcctgctcgcctgaccagaccaggccggagaacagttccggatggtccttgtccttcagacgatccccacgccccagcttcacgctggcgatgaactggcgatgagtggtgtcgagcacgccctgccagaactgggtttcatcggctttttgcggctggaacggatcaaggaacgacttgtgttcacctgaggtataagtgcgacgctctacccccagcttctccatggtgccgacgaaaccataaccggccgccgtcacaccaatggagcccaccaggctggccttgtcggcgtagatctgatcagcagcactggcaatgtaatacgcaccggaagcgcccaggtcggaaatcactgcatacagcttggtatccgggtgcaggccacgcaggcggcggatctcgtcatacacataacccgactgcaccgggctgccacccgggctgttgatgcgcaggatcacacctttgaccttagggtcttcgaacgcggcacgcaggctgctgacgatgttgtcggcgctggctgactccttgtcggcgatcaccccgcgcacttcgatcagtgcggtgtagttggcgccacgggttgcgcttttctccatatccatcagcggactgaacagcgccagcatgccgatgagccagacaaacgtcagcagtttgaagaaaatcccccaacgccgcgcgcgacgctgctcttggacgctggccaggagagtcttctccagcagcttccagcttttgtcatcactgctttcagccttttcgggcgctttccactcgtcactcatgccatcaaccccagcaaagacttattgggcctggttgagccaggcctgcaattcggaaaaatgatcgatcgtcagtcgcggttcatattgctgcaacgcctcggcagcctgggcgccatagctgaccgccacgccgtccatgcccgcattgcgcgccatcatcaggtcgaaggaggcatcgcccaccatcaaggcctggcgtggcgacacgccgcaatgagccaggatctgctccagcatcagagggtgaggcttgctggcagtttcatcggcggcgcgggtgatatcgaaataatcttcccaaccgtgggccttgagcacccgatccagaccgcgacgggccttgccggtggcgactgccaggtgataaccctgggcacggaatgccgccagggattgcaccacaccgtcgaacagcggcgagggcgtagcctccagggcgatgtagtgatcggcatagtgttcgcgaaacgcgaccagttcagcgtcgctgatctcgggatacagggtacggatcgcttcgggaaggcccagaccgatgatgcccttgaccgccagatcactgcacaacgcgtaacccgaacgggtcgatgcagcgtgcatcgactcgacaatccggccaatggagtcggccagggtgccatcccaatcgaatatcagcagtttgtagtcaaggtgcgacactcaagcgctccacggtcttggcccacatctcatcgaccggcgcctgcagcttcaattcgccaccatcgggcagcggtaccgtgagcatgtaggcgtgcaggaacaggcgcttgccgcccaggtcgcggatctccttggagaaatcctcgtcgccgtacttggtgtcaccggcaatgcagtggcccgcatgcagggtgtgcacgcgaatctgatgggtgcgcccggtgaccggcttggcctcgaccatggtggcgaagtcgccgaaacggcgcagcaccttgaacagggtcagggcttccttgccctcctcgtccacttcgaccatgcgctcgccggagcgcaggttgctcttctgcaacggcgcgcggacgctcttgatcgagctggcccagttgccgcgcaccagcgccatgtagcgtttgtctacgccatcgccgcgcagggcggtgtgcaggtggcgcaacatgctgcgtttcttggcgatcatcagcaggccggacgtgtcgcggtccaggcggtggaccagttccagctccttggcatccgggcgcaactgacgaaaggcttcgatcacaccgaaattcaggccgctgccaccgtgaaccgcaatgccgcagggcttgttgatcacgatcagcttgttgtcttcgaacacaatcgaggcttccaggcgctgcaacaagccctgggccaacggcacaggctcgtcacgctcaggcacgcgcaccggtggcacgcgcacgatatcgcccgcctgcaacttgtactcgggcttgatccggcccttgttcacccgcacttcacctttacgcaagatgcggtaaatcaaggtcttgggcacgcctttgagcctggccaggagaaaattgtcgatgcgttggccggcatattccggcgagacctcgagcagctggacgctgggggtctggggggcggtagtcgtcatggcggcgatgataacaattttttatggaattgaagcacttaatcattgctgctatagtcgcgaacgccgccaaaagcggcctggacagaggacatgcggcaaactgccggccctgaccatcgcaattcatcaggacgcgaggccgtcctacggggctttcgccaccctggaaggctcaagattgtaacaagcgcaggtgacatgaggcctgaagcgagtgcagaaagcagagtgaatactcgcgttttgcgccgatatttacggccagttcacaaagtgcagtcagtcttgagccagaccacggcgaatacttcggaaacaacgcctgttaagagctgagtgagagcgcaaccgcccacacctagtcttgtttagccatgagcgtggactccccattggagaacacggtaaatgccaacccgctgcggattctgcgcgcggcagcacccgaattatcagggatacgtgtagggtggagatgcacaaccgtcggaccgtgtagcactaggcttatatttagacgcttcatctcgtccacagtcgccggttgattcctcctcctgaccttagcttttgttgaagtggtgcctttgtcaccaccgctaacaagcaggacgcgtccgtcgcgataccggcccaattggctcgttattgctggacactggagtggccaaccactcttgacgcacctgacaccgaccgtgagaagtcgtgtgtgccgaacgccgtttccggcagcccggaaaccgacggtacaacatgaaaagaatgctgattaacgcaactcaacccgaagagttgcgtgttgcactggtagatggccaacgcctctacgacctggacatcgaatccggtgcacgcgagcaaaagaaggccaacatctataaaggccgtattactcgcatcgaaccaagccttgaggctgcctttgtcgatttcggctccgagcgccacggcttcctgcccctcaaagaaatctcccgcgaatacttcaagaaagcccccgaaggccgcgtgaacatcaaggacgtcctgagcgaaggccaggaagtcatcgtccaggtcgaaaaagaagaacgtggcaacaagggcgccgccctgaccaccttcatcagcctggctggccgttacctggtcctgatgccgaacaacccacgcgccggcggtatttcccgtcgcatcgaaggcgaagagcgcaacgaactgcgtgaagcgctgaacggcctgatcgcaccggccgacatgggcctgatcgtgcgcaccgccggcctgggccgcagcagcgaagaaatgcagtgggacctcgactacctgctgcaactgtggaccgccatcaaggaagcctccctggatcgttccgcgcctttcctgatctaccaggaaagcaacgtgatcatccgcgccatccgcgattacctgcgccaggacatcggcgaagtgctgatcgacagcgttgaagcccaggacgaagccctgaccttcatccgccaggtgatgccgcagtacgccagcaagatcaagctgtacgaagacagcgttccgctgttcaaccgtttccagatcgaaagccagatcgagaccgccttccagcgcgtggtcgaactgccttccggtggctccatcgtgatcgacccgaccgaagccctggtgtccatcgacatcaactcggcgcgcgcgaccaaaggcagcgacatcgaagaaaccgccctgcagaccaacctggaagcggctgaagaaatcgcccgccagctgcgcctgcgtgatatcggcggcctgatcgtgatcgacttcatcgacatgaccccggccaagaaccagcgcgccgtggaagaaaaagtccgtgaatgcctggaagctgaccgtgcccgcgtacaggtcggccgcatctcgcgcttcggcctgctggaaatgtcccgtcagcgcctgcgtccgtccctgggcgagagcagcggcatcgtctgcccgcgttgcaacggcaccggcatcatccgtgacgttgaatcgctgtccctggcgatcctgcgcctgatcgaagaagaagccctgaaagaccgcaccgccgaagtccgcgcacaagtgccgattccggttgcagctttcctgctcaacgaaaaacgcaactcgatcaccaagatcgaactgcgcacccgtgcccgtatcgtcatcctgccgaacgaccacctcgaaacgccgcacttcgaagtgcagcgcctgcgtgatgacagcccggaagcccacagcggccagtccagctacgaaatcgccgcagctgccgccgaagtcgaagaagtgcagccagccgccgcgacccgtaccctggtccgccaggaagccgccgtgaaaaccgctccggcccgtgccaacgcaccggttccggttgaagccgccgctccgattgccgccccggccgtaatgcctgagccaagcctgttcaaaggcctggtgaagtcgctggtgagcctgttcgccaccaaggaagaacctgctgcaccggttgtggttgagaaaccagcgaccgagcgccctgcacgcaacgaagagcgtcgtaacggtcgccagcagagccgtaaccgcaacggccgtcgtgacgaagagcgcaagccgcgcgaagaacgtgcgccgcgtgaagaacgcgccccacgtgaagagcgtgcgccccgcgaagcccgcgaagaaaccccgaccgtagaacgcgcaccgcgtgaagagcgcgcaccgcgtactccacgtgccccgcgtgaagaccgcaagccacgtggcgagcgcgaagagcgtgtgcgcgaactgcgcgagccgctggacgctgcgccagccgttgccggtgcagctgttgttgccgaagaacgcccggctcgccagccgcgcgaagaacgtgcgccacgtgaagaacgccagcctcgcgctccgcgtgaagagcgtcaaccacgtgccgaacaggccgccgccgccagcgaagaagaagtgttgaccggcgaagagcaattgcaggaagacggtcaggaaggcgccgaaggcgatcgtccacgccgccgctcccgtggccagcgtcgtcgcagcaaccgtcgtgagcgtcagcgtgatgccaacggcaacgtgatcgaaggctcggaagagaccggcgaaaacgcagaagccgctaccggcgaaccgactggcgccgaactggctgccggcctggccgttaccgctgccgttgccagctcggtcatcagcgctccggctgaagcccaggctcacgagcaggctgagcgcgctaccgcgactgttgaagaagccgtcgttgtagaagcacctgctgccgagaccccggtggttgaagcgccggtcgttgaagcacctgctgccgaaaccccagccgtagaagcgcctgttgttgaagcgactaccccgatcgaagcaccggttattcctgaagtggaagttgctccggttcaagaaaccctaccagaagttgaagcggtggctgagcaagcaccggtagtcgagcctcaaccagtggttgaagcagtggttgatgctgctccagaagttcgtgaagttcgtgaagaacagaccgccttccaatggactgccgagcctgccgctccggttgaagcgccagcacctgccccagcggtagaagaagcgccggcaccggttgccgaagttgtggttgccgagccagccccagtggttgagcccgctccggcctttgaacctgcgccggtggtagaagtgccggtggttgccgaagtggctgcacccgtggttgaagccgctccggtcagcgccctgaccgaaaacggccgtgcgccgaatgatccacgtgaagtgcgtcgtcgccgcaaggaagctgaagccgctgctgctgccgcagccgcagcacaggaagcagagcacgagagcaaacctctcgtctgattcccgcagcaactaaaaagccccgcctgagtgatcaggcggggcttttttatgttcgttcgattagaggtaatgcaacaacgcaggcacgtccacatcccataacacgccagggtcatctacaggcacctcacgcacagtcgcctgggcaaacaacggcttggctccacgatcaccggtcaaagccatcaactcaggcccaaatgcccggccaaacgccacaggatgcccgtaatgcccgtcctgcaccggcacactgatgccaccctcctccaaccccgcaatcactcgctcaatgctcgatgactgaataaacggcatatcccccagcaccaccagccaaccattcgccgaagcactggcggcaaccgcagcggcaatactgtcgcccatgccggccgagcacagcagcaataccttgcagccgtaggcctctgccaggcaaatcacttcagaccgatccggtgaagtcaccacccagcgatcaaccacgacactcggtagattcttcagtacctgctcgatcaccggccgaactacaccacccaggcccacacaatccgccagcaacttatcctggtcagcccctgccaccgcgcgaaaccggctgccctgtcccgccgccagcacaatcgcggtgatgctcactcaaccaccaccggcagcggtttcttctgcatcggtgccacgccgttcttgatcgcgacaatttccgccatcaacgacaatgcgatttccgccggcgtgtgactgccgatatgcaaaccgatcggcccatgcaggcgcgcaatcgcttgcgtcgataaccccagcgccgccaggttctcccggcgcttctggctgttgacacgtgaaccaagggcaccaatgtagaacgccgaggaattcagcgccgtcagcaaagccatatcatccaggcgcgggtcatgggtcaggcagacgatggccgtgcgctcgtcggtctggatattcaacactgcgtcatcaggcatgcccggcacaaagcggccgtgctgctcttcccagccgtagacgaactcatcacgcgggtcgcagatcagcacttcgaaatccagcaggcgcgccatttccgccacataccgcgacagctgcccggcgccgatcaacagcaggcgccagcgtgggccatagatggctcgcaggcgttcaccgtcgaaggtgacgacatcggtcttgctcgcgccactcaacgtcaccttgccagtggccagctccaactcccgggcgacgatctgatgatcctcgcaccgcgccaacagctcagccacccactcccactcgtccacccgctcctcggtcaggcgcaaggtgccgccgcacggcaggccaaaacgcgccgcctcatcgcgggtgacgccgtaggtcaccaactgcaccggcggcccgtcttcaggcagccggccatcctgcaggcgggcaatcaagtcgtcttcgatgcacccgcccgataccgagccgatcactaccccatcgccccgcaatgccagcatggcgcccggcgggcgcggcgcgctgccccaggtctggaccacgctgtacaacaccactcgctgtccggcacggcgccattcgagcacgctgcgcaggacattcagatccacactgtccacataacctcctgcaagcgttaaaaccgagtcattcactgtaaaacaaaagtcgccgaagtgacgcgccagaaacgcaaacgccccgaaccagtcggggcgtttgtgcgttgctgtcggcgttagttcacgccatcggcgatttacttgaccacaggtgcagggccttcggccacgcccaggtcatccagttcacgggtttccgagataccggtgccgccggacgccagctcgctttgcagcttgtcggtatccagctccttgacccatttggccacgacgatggtggcaacggcgttacctacgaggttggtcagcgcacgggcttcggacatgaagcggtcgatacccagaatcagcgccaggccggcaaccggcaggtggcctacggccgacagggtggccgccagtacgatgaagcccgaaccggtcacgccggcagcgcctttagaggacagcagcagcaccagcagcagggtgatctggtgggtgatgtccatgtgggtgtcggtcgcctgggcgatgaacacggccgccatggtcaggtagatcgaagtaccgtcgaggttgaacgagtagccagttggaatcaccaggcctactacggatttcttcgcgcccagacgctccatcttgatcagcatgcgtggcagtgcggattcggaggaggaagtacccagtacgatcaacagctcttcacggatgtagcggatcagtttgatcacgctgaaaccgtgagcgcggcagataccgcccagcactaccagcacgaacaggatgcaggtgatgtagaagcagatcatcaactggcccaactgcaccagcgaacccacaccgtaggcaccgatggtgaatgccatggcgcccagggcaccgattggcgcgagcttcatgatcatgttgatgatgttgaacatcacgtgggcgaagcgatcgatgaagtccagtaccggcttgccgtaggcacccaggcggtgcagggcgaaaccgaagatcaccgagaacatcagcacttgcaggatgtcgccgttggcgaaggcaccgacgatcgtgttcggaataacgttgaggataaagccgacgatgctctggtctttaccggcggtcacgtaggccgcgactttggaagcatccagggtcgctacgtcgatgtgcatgccggcgcccggttgcacgacgttcaccacgatcaggccgatcagcagcgcgatggtggaaacgatctcgaagtacagcagcgcgtagccgccggtcttgccgaccgatttcatgctttgcatgccagcgatgccgctgacaacggtgcagaagatgatcggggcgatgaccattttgatcagtttgataaacccgtcacccagcggcttgagggccacaccggtctgtgggtagaagtgaccgagcaaaataccgataacgattgcaacgatcacctggaagtacagggatttgtagataggctgacgagtcgtcattgcaaagttcctcaatcgtcccgtgtggcaaatatccgccattgcccacgacacttgaattgcgaaccctcctgcactggagggatttgttgtttgcgaggtctgtaggtccagcctgcgctgtaatccttgtcgcaaacaccgtgccactttgctgaaaaaccctgaaggcctttagacatcagggcttgggcttctccggccccctcccaagcctccaatcgagtggcggatttccgcccagcgccccaatcacgtcctacaatttggcggatatccgccttgtgaccctacccgggcatgactaccatccgcctctccatggacgaggccttcgcatgcgtgaacgtaccatcgccagccattacgctcgggcagccctcggcggcgcgcgcagggcgggctacgactactcgggcctgctgttgcaggcaggcatcaccccggaactgttgaccgaaccccgcgcccgcatcgcaccggaacaatttacccggctgctgcaaatgctctggctggcgttggacgatgaatacctggggtttgccgacggcccgagcaaacgcggcaccttcgccatgatgtgccacgcactcatccactgccgcaccctggaaaaggctctggaacgcggcttattgttttatagcctatttgcgcaaggcccacgctggcagctgacacgtgaaggcgacatggcccgcttgagcctggacgactcgcaactgtgggacccggatcacttcctcagcgaatgcctgctggtgatctggcatcgactcggcagttggctgatcggccaacgcatccgcctgcaccaggccaccttcagctacccgatgccggcccacgccagcgaatatgacctattgtttccctgtgcccaggtattcggcgcaccgaacagcagcctggtgtttcacagccgctacctgagcctgccgctgctgcaggacgaacgcacgctcaagcacttcctcgagcgctcccccgccgacctgttgtcccgcccggatgaaggcgacagcttgagcagccagctacgccgcttgctcagccgcgaccaaacaccctggcccgacctggaagccgtcgcccagcacctgcacatcagcccgcagaccctgcgcaggcatttgcgcgaagaaggcaccagctttcaggcactcaaggatgagttgcggcgggacatcgccatctatcatttggggcgcgcggatttgtcgttgcaggagattgccgagcagttggggttttccgaaccgtcggcgtttcatcgggcgttcaagaagtggacggggttgacgccgggggcttaccgagcaaaagagagttagagatgtagcgcctggactaacgctatcgggggcaagccccctcccacctttgaatgtgttcaaacatcaaaatgtgggagggggcttgcccccgatgaggcctgcacaccccataaagatcacaaagccgggaagtgaatcctgaaagcggcgccacccaatggcgaatcgcccagggtcaaccgcgcaccgtagctttcgatgatgtccttgaccaccgccaagccaatcccctgccccgggtgctggcgatccaggcgctcaccccgttgcagaattcgtgcacgctgatccggcggcacgccaggcccgtcatcctcaatacacagctcggtgccttccaggctttccaccaggctgatgcgcacttcgctcaagcacaggcggtaggcgttttccagcaggttgccgagcaactccaacaaggcgcccttctcgatcggcacatcgcattcttccggcaggtcgaaggacacgctgacgcgcttgtcgcggtagaccttgcccagcgtatcgcacaggctttgcagcaccggctccaggcgcacctggtggcgcaccaggccgcttttgcgcaggctggcgcgctgcaactgatagctgatctgctgactcatgcgctcgatctgcgattgcagcacccgggcctgctcgcgatcttccggacgctgggccatttcttcgctcactccctgtaaaacggcgagcggggttttcaggctgtgggccaaatcgtcgagggaatcgcggtagcgcacgcgttgctcacgctcgctgtgcagcaagcggttgagggagccggtcaggcgcagcaattcgcgggggtgctgttcggagaggctctcacgggtgccgccttcgatctggtcgagttcctggctcagccgccgcagggcttgcaggccccaggtcaggcccagccacagtaaggtcaacagcaccagcaaggctgcgccgaagcccaggtagagattttcgcgcaggccttccagggtcaactggtattcacgcaccggttgcagggccacgatactgaaggcggcgctcttgccgcccagtagcctgacctcgacgtcatacacgaagaattcctggccgttggcctcgcgaatccgcgcaaactcgttaccgcgcccgtcgtaacgcggtttgtagttgatgttttcttccttggtcgcccgcgaacgccacaccaggtggccttcgcggtcgtagatgtagccgagcaggcggctgtcagtgaggttgaagcgttcgtcgggcaactgcgccggcatcagcaggcggttgttttcgacccgcgcggcagagatcaaggtggtgacgtccgacgccaggcgttgctcgatggaatcctgcaacgccaggctgaacgccccttgcatggccggcaacaggccgagcatgaacagcacggccaaggtcgcggccgccagcatcaagcgcacgcgtagcgagcgaatcaacggcagcgctcattgaacagatagcccaggccacgcacggtgtcgatcggcttgaacccggccgggccttccagcttgcgacgcaggcggccgaccagcacctcgatgacattcggatcacgctcgtcgtcatcggggtagagctgttccatcaagcggtctttggcgaccacttgttggtgatgacgcatcaggtattcaaggatccgatattcgtaggcggtcaacgccagcggctgctcttcgagcgacgcctgcttgcggttgagatccagcagcaacggcccggcaacgatggtcgactgggtaaagccactggagcggcgcagcaaggcgttcatccgcgcctccagctcttcgaactggaacggtttgaccacgtagtcgtcggcacccgcagccaggccttcgaccttgtcctgccagttaccgcgggcggtgaggatcaggatgggaaaggtcttggcctgagtacgcagttggcggatcaggtccaggccgcccatgccgggcaggcccaggtcgatgatcgccaggtcatggttgaactggccagtctggtacagcgcctcttcggcattggccacggcctcgaccacatgcccgctgtcggtcaggcgggtaaacaggtgatggcgcagcagcgcctcatcttccaccaccagcaatttcataaggctctccaaggcaattcaactgtccgacagagggatatcatagcggccctgcagctcttgcgggcgcagttttatgccattgaactggccggtcaggtgttcataaccggcgcgatagcccgcctgcggggtgacaagccccagggactggccccagggcgtgggttggctgcccacttcttcgaagctgacacgctggatcaaggtgctggatttcttggttttttcaccgccgaatgcggcgaaggcgccgtcggatgcctggaccccagcggtggcactgagcatggttaacgccaacatcagctgtttgatcgcagtcatggtgttacctctatgcgtttggctgtatgccccagactacgcaggcgcccctgaactccccctgaacgggctctgaaccccacctgaaccacagcgggctatcctcgcgcccctcaactcggcaaaataccgcccatgaatccgctacccgcttgctgcaccccactcgacgcccattggccgctgcccgaatcgttgcccggcacggtgtttctcagcacgcgttttgacccggccctgctcacgcctggcgacttccagcgctgtgccgtgccgccaccggcgagcatccagcgctcggtggccaagcgccaggccgagttcctcgccggtcgcttgtgcgcccgtgccgccctgcaacaactcgaccacctcgactgcatccccacgatcggcgaagaccgcgcaccggtgtggcccgcgcacatcagcggctccatcacccacagcaccgggcacgccgccgcgattgtcgcgcacaaggcgcaatggcgcgggctggggatggacctggagaatgtgttgagcctggagcgggcggagcggttggccggggaaatcctgacggctgatgagctgcaacgcatggccaccttgccaagagagcagatagcgcagttggtaacgctgacgttctccgccaaggagagcctgttcaaggcgctctaccccattgtgcagaagcgtttctactttgagcatgccgagttgctggaatggtcagaggccgggcatctgcggctgcgactgctgacggacctgtccgaagagtggtgccatggcaaggaattggtggggcagtttgcggtgggtgatgggcagctgttgagtctggtcgcagtcagcgcctgatccatcaggatttatcctgatccctgggccaactcaaactgaaacacgcgccgcccaagttattgctcttgctgatcaacgcccgcccaccgtgccaatagataatccgccgcacaatcgacaaccccaggccatgcccgcccgaggcacgggtgcgactgtcgtccaggcgcagaaagggcgtgaagatgcgctcccaggcgctttccggcacgccggggccgtcgtcttccacgtcgatgcggcagcgtacctggcccacctgataactgatcaacacctggccctgggcgtggcgcatggcattgctcaccagattctgcaacgcacggtgcaggtagcgcggctcggcatcgacccaggcgtcgtcccaatgcgccgaagacaagcaaataccacgggctacatttatttgcggacgcagtggcgataattcgccgatcacctgatcgagcagcgcatcaaggtcgacccgttggaaattcagctctggcgagccttgttccaggcgcgcataagtgagcatttcatccactaggccgtcgaggtcctggatgtcactgtccatgccctccaggtatttacgccgcgcctcgacggtagtcgcgtcgccgaccatctccagaccaaaacgcaagcgtgccaccggcgtgcgcagctcgtgggacaccgcgcgcaccagttcgcgctggatcgccagcagctgttgcaaatgctcggccatgccattgaacgccgccgccagccgccccaccgaatcggcaccacgggccggcacccggacttccaggttgcccttggcgatccgcgtggcggcggcttccagaccgcgcagccgacgttcaagctggcgcaccaatagatagacgatcagcccgatcagggtcaggccgatcaaggcgatcaggatcagccattgcgccgggtaagggttcatctgatacaacgggccgatctccagcacccacggcgtaccgaccatgccggcaaacacgcggatcgaatcgccgcccttgcccagggccatcaccgtatcgccttccgatacacgacggcgctggtcttcatccatatcagcctggtcgaggggcatcaggtgcatgtcaaagccaaagcccttggcttcctttatctgcgccaggcgttgcggctgttcggccaccgggaagcgcaccagctcatcggccagcaggtagatggtcgcgcgcgccagttgttcgctgatctgctgcacttcacccgtcagcacaagcggctcttgttcgctgaccaagcgcagtacccgcgcggcatgtggcccggtctgttgcaccagcacctggccgcgttgcaggcgattgcgctggctcaagtccagttgtgcatcggccagcgggcgcaactccagcgggatccccagcaaccgctcccacaccgccagggcgcgctggcgctcgatggcactcatgggttgcaggttgtcgcccatcaaggcgaaggtgccatgggccaggcgctcgcggtactgaccgctgcgcacctcgttgagcaggtgcagggcgagtacgccgagcagcgccaccaggatcagcgccgcgcacatgccgccgtagatgcgcaggaagatcgagttcacagcggcatgtcggcggcggcttcggggacgaacaggtagcctttgctgcggatagtcttgatcaggcgcgggtggatcgggtcgtcacctatcttggggcggatgcgagaaatacgcacgtcgatggagcgatcctggccgtcgtagccgatgccgcgcagggcaatgaagatttcttcgcgggacagaatgcgcccggcattcgccaccaatagccacagcaggtcgaactcggcgctggtcagttcgatgccgtcattattcagccaggcttcgcgcagggcattgtccaccaccagggggccgaattgcaggcggcgctggttctccgcgctggcggtctcggccgactcactgcgccgcagcaaggcctggatgcgcgccagcagcaggcgcggacgcacgggcttgcacacataatcgtcggcgcccatgtccaggcccagcacctggtccatgtcgtcggtgcgcgcggtgagcatcaggatcacgccgtcatagcgctcgcgcaccttgcggcagatgctcaggccgtcttcgccgggcagcatcaggtcgaggatcaccaggtcgggctgttcggcgatgatccgcgccgctgccagggcgccatcgccctccaccgagacgcgcaggccgttgctctccaggtactcacgggtcaactcggccaatcgctggtcgtcttcgactatcaatacctgccaggcttcttgctccacgggtgacctcaatgtctgtcataaaaggcgggcatgatgtgggtcacttcttagcccgatgtgggcgattgtagccatgggccagccctcaaacacaagccgggaaatccattcggtgatcgcgtttttttgtgatagggttcgcgcccttcgaaaatgggccgcttgttttgagcccgtaacatttaatgacaaacggtgtaatccagcagcaatgcggcctacacggctgttctacctttcttacacattttacccacagcgttatccacaggttactgcgttgctaacccctcaaaaacgcattatcttgtacctcggcactacagaagaccctacatgtggggttttcacagaaatcgcccaaccacacaagtggctcgaaattcaagcgttttattgctagcgcagcatggaaccaaccgattttcagtagaccaaaccgctcacgcggatggcagctgtttcccatccccgatatggaaaacggtacgggtgttgcaggaagagcctggcactcgcaatcaaatatagaacgtggagacaaccccccatgcaaaccgacacaactcgcgagaacccgcaaggctccgtgccgcaggccgccgattcgaacctggatctgtccgccactgcacccggccaattgcgcgtgatcaagcgtaacggcactgtcgttccttacaccgatgacaaaatcaccgtcgccatcaccaaagcgtttcttgcagttgaaggcggcaccgctgctgcctcgtcgcgcatccacgacaccgttgcccgcctgaccgaacaagtcaccgcgaccttcaagcgtcgcatgccatcgggcggcaccatccacatcgaagaaatccaggaccaggtcgaactggccctgatgcgtgccggcgagcagaaagtcgcccgcgactacgtgatctaccgtgattcgcgcgccaaggaacgtgccgtacgctccccggccgaagaagccgccgtgcaagcgcatccgtcgattcgtatcaccctggccgacggcagctttgcaccgctggacctgggccgcctgaacaccatcatcaccgaggcctgcgaaggcctggaagaagtcgacggtgacctgatccagcgcgaaaccctgaagaacctgtacgacggcgtggccctgaccgacgtcaacaccgccctggtgatgaccgcccgtaccctggttgaacgcgagccgaactactcgttcgtgactgcgcgcctgctgatggacaccctgcgtgccgaaggcctgggcttcctgaaagtcgccgacagcgccactcatcatgagatggccgacctgtacgccaaagccctgccggcctacatcgccaagggtatcgaattcgaattgctgaacccggtcctggccaccttcgacctggaaaaactcggcaaggcgatcaaccacgagcgtgaccagcagtttacctacctgggcctgcagaccctgtacgaccgttacttcatccacaaggacggcatccgcttcgaactgccgcaagtgttcttcatgcgcgtggccatgggcctggcgatcgaagagaagcacaaagaagaccgtgccatcgagttctacaacctgctgtcgtccttcgactacatgtcgtcgaccccgaccctgttcaacgccggcaccctgcgtccacagctgtccagctgctacctgaccaccgtgccggacgacctgtcgggcatctaccacgcgatccacgacaacgccatgttgtccaaattcgctggcggcctgggcaacgactggaccccggtgcgcgcactgggttcgtacatcaagggcaccaacggcaagtcccagggcgttgtaccgttcctgaaagtcgtcaacgacaccgccgttgcggttaaccagggtggcaagcgcaaaggcgctgtctgtgcctacctggaaacctggcacatggacattgaagagttcatcgagctgcgcaagaacaccggtgatgaccgtcgtcgtacccacgacatgaacaccgccaactggatccctgacctgttcatgaagcgtgtcttcgatgacggcaagtggaccctgttctcgccatccgaagtgccggacctgcacgacctgaccggtaaagccttcgaagagcgctacgagtactacgaagccctcaccgagtacccaggcaaggtcaagctgttcaagaccatccaggccaaagacctgtggcgcaaaatgctgtccatgctgtttgaaaccggccacccatggctgaccttcaaagacccgtgcaacctgcgcagcccgcagcagcacgtgggcgtggtccacagctcgaacctgtgcaccgagatcaccttgaacaccaacaaggacgagatcgccgtttgcaacctgggctcgatcaacctcccgaaccacatcgtcaacggcaagctggacaccgccaagctggaacgcaccgtcaacaccgctgttcgcatgctcgataacgtcatcgacatcaactactactcggtgccacaggcgcagaattccaacttcaagcaccgtccggtgggcctgggcatcatgggcttccaggatgcgctgtacctgcagcacattccttacggttcggatgcagcggtcgagttcgccgacaagtccatggaagcggtcagctactacgcgatccaggcttcctgcgacctggccgacgagcgcggcgcctacgagacgttccagggttcgctgtggtccaagggcatcctgccgctggactcgcaacagatcctgatcgaagcccgtggccagaagtacatcgacgtcgacctgaacgaatccctggactgggcgccggtacgtgcccgtgtgcagaaaggcattcgtaactccaacatcatggccatcgcaccgaccgccaccatcgccaacatcaccggcgtatcgcagtcgatcgaaccgacctaccagaacctgtatgtgaaatcgaacctgtcgggcgagttcaccgtgatcaacccgtacctggttcgcgacctcaaggctcgcggcctgtgggactcggtcatgatcaacgacctgaagtactacgacggttccgtgcaacagatcgagcgcatcccgcaggaactcaaagagctctacgcgactgccttcgaagtggacaccaagtggatcgttgacgccgccagccgtcgtcagaagtggatcgaccaggcgcagtccctgaacctgtacatcgccggcgcttcgggcaagaagctggacgtgacctaccgcatggcgtggtaccgtggcctgaaaaccacttactacctccgtgccctggccgcgaccagcaccgagaagtcaaccatcaacaccggtaagctgaacgcggtttccagcggcaaccatggtgatgactcggtgcttgcagccccagccggcccggcgccagtgccaaaggcctgcgcgattgacgagccggattgcgaagcttgtcagtaagctgaggcactttcaggtttaactacctgaaacagcgagccccctgtaagcccaggatttcaaccgggcttacagggggcttttgattacaggagatccctctttttacttaggcatacccccgcttgaagctccaggcaatcaaattgggatcagtgcgtgcattgccgaacttcgtaccccatcgatcctcattaccgcccattaccgccaccgaatgtgttgaattatccaaggtgccgggccggcccctggccaactcagaaggactgactctctctacaagatttttataccccaaccgatcgaaagtctccttagcccactccccattattgatgctatcaatggcttcgctgaagcttctcccggaaataccgtcgttacgctggttcattgcctgaacgttattcacggccaacatgagattcataaacccaagcaacttgggatcctgtccctgtagttgagcccttgctgctgtctcacggtactgcgactgcgtaacccggacatgattgccgtctttgagcgttacatcgtaattacctgctgagtcccgcttgacgtccttaaacacacccgctggcccatactgcgcaatcatggccttacaagccgaaatagcgccgcaattacctgcttgtccctgataggcaccggaaaagagatttttcggcatttcaccaggtttgtagctacccggctcgaaattggtttgatgggttcccgccgtgaccggcaagttacccaccgcctctcctaaccctaaccccccacggtcaacgccaccgccttcgtaacgaccgcgtccaccaccgccaccacccgaaccaccaacaccacctcctatcccgcggcttgactgcgattcaacatcagtcgacacgccatctggaaacagctcaggaaacagtgccttcataaactcaagccaactgttaggcgcgtccttttttaactgctcgataatctccttgaacttgtcctcccccaacttcttgcgcaaatcattcagcttgtcacgcaagtcttgaacagtctggttcttggaggttttctgagcgtcttccagttccttgagtagttttaagacggcatccttatcagcagctgtgctgtctttggtttcctcagtgcgcggtacacccgtccctccttgccaatacaccaagcccctatcgcccgacgtcaataagtcccacataaccttcgcctctaacaaaactattggctcaatgggtggagcaagaggtgtaggtagttccagcaaatcgtgtgatctcttgagcgggtagccctgccaaaaaatcaatgcaaaaaaaacccctcagtcgaggggcttctttcttcaagggatcaggccaacagcgtcacgtcatctgaatgatggtctgcatgatggtgctctgggtggagatggtcttggcgttcgcctggtagttgctctgggccttgatcaggtccaccagctcgttggtcaggttgacgttggagttctccagggagttggccacgatcgaccccagggtaccggcttgcggggtgtcgtaacccggctggcccgacgcgaaggtttctttccaggtggtgccaccggctggctgcaggccctgctcgttgttgaagctggccagggagatctggccgatggccttgctctgctggttgctgaacgtggcgaacagtacgccgctaccgtcgattttcagcccggtgatctggccggtggcgtagccatcggtgaccggtgggttgcggtaggtggccgagttgtactgggtgatgttggccatgttgacggcgatacctgttgggttcgcatccgcaccgttggccttccacacaccattggtcacggtgccaggaacccaaccggtaatggtcagggtcttgtcggagacaccaccggtgaccacactggtcagcttgccggcgccgtcaaaggtcaaggtcgatggcacaggtggggtcgatggggtgccggttggcgccgaaccattagggttgcgaccatcgatcagggtataggcattccacttattgccgtcggttttcaccaggtactgcaccatcgggtgcgcgttgccctgggagtcgtacaaggtggtgctgtactgggtggtaaaggtgctggtgtcgttcgggttgaacggcttggccacctggtcgatcaccggctccgaggagttcaggttactggtggaatccactttggtggaggccttgggcggcaggttcgacaggttcagttgcaggtcggtcaggccgcccttgatgatcttgccatcggcatctgccgcgtagccttgcaggcgcgaagtgccggtgttgttggtgatgtagccgtctttgtcggcacggaaggcaccgctgcgggtgtactccagcgaaccgtcgctgcccttctgcacgaagaagccgccaccctggatcgccatgtccaggatcccgccgctgccgttgacgtcaccttgggtgaactgctgcgacacggccgcaaggttcacaccgttgccgatgctgttctggccggtgcccagcttggacgcggcgtagatgtcggcgaattccgcacgggacgacttgaagccagtggtcgcgacgttggcgatgttgttgccggtcacgtccagttgtttgttggccgcatagaggccgctaaggccgatgttaaaagacatgtttctctccctctgccgtatttagccggctctatgtaccgatagtctgaatttgcgacagcttgacgctgcccatgccgccagccaggttcagcagcatttcgccgccggtcttgctcagggtcacgctcgttaccgtcgcgggcagcgaagtggccagggcaacggagtcgcccttgtcgttcttggtggtggcgttgaaggtgtaggtacccgccggggcaacctcgcccttgtcgttcttgccatcccagatgaagttctgggtgccggcgctctgggcccccatgtcgatggtgcgcaccacgttgccgtctttgtcggtgatcttgacggagacgttgcccaccgccgaggtcaccgccaccgaaccggtcatgctcttgctcgtatcaaccatggccttgtcggtctggatgatgatcgagcgcccgaccagcgacgaggcctgcaacgcctgcgacgaactgaagttggtggagatcgcattcaccgagtcgttcagggtgttgatgccttccaggctgctgaactgcgccagttgcgccacgaacgcgccgttgtcttgcggcgacagcgggttctggtttttcagctgggtcaccagcagttgcaggaacgcatccttgcccaacgcctgcttgcccgtcgccttattggcggcgtcgctgacgctgctgttgtcctgggcgttcttgaccttggagttgaacaggtcctggaccggcgtgttgtttgacgtatcaacgatggccattgtttggcgccccttatcactgacccagggtcaggaccttctgcatcatggttttggcggtgttcatcatttccgcgttggtctggaacgagcggctggcggaaatcatgtcagccatttcctcgaccacattgacgttggggtagtagacataacccttttcgttcgcagcgggatggttgggttcgtagcgcgcttcaaggttgctctggtcttcgaccacaccgagtacctgcacgccggagccggcggccccctggtcctggaacagcgaatcgctgccgccgttctggcctgcctggaacatggtggcgaacaccgggtgacgggcacggtaggtctggtcaatgctcgaagacacggtctcggcgttggcgatgttactggcgacggtgttcaagcgcgtggtctgcgcgctcatgccactgccggcaatattgaaaacactggacagggacatggcttactctccacgcagggctgacatcagccctttgaatttgctgttgagcagggtaaagctggcctggaagttcaccgagttctcggcgtaggccgattgctccagttgggcgtcgacggtgttctggtcgatcgacggttgcatcggcgtgcgatacagcaacgactcgtcaccattgctcaggccttgcgcttcgatatgacggctgttggtcatgttcaaggcgaaggtgccgttcttggtcttgtcctgctgtgcggcgagcacggcggagaagtccaggtcccgagccttgtagttcggggtgtcggcgttggcaatgttgttggccaggacttcggcacgctgggcgcggaagcccagggcttgttcgtggataccgagcgctttatcgaagctgatgctcatggcggaaaccttcaagggctgacctgcttttcgttaacagggttatagcaaggtgcatgccaatctggcgcaagcccgtatatcaagggttttggtaaggggttgccggcggcaatgccggaaaagcggcaagcggtttccgcgtcgcgccagtaaagcggcaatgagggttgccgctttattgcggtttgccgcaaaccaaatgtgggagggggcttgctcccgatggcnnnnnnnnnnnnnnnnnnnnnnnnnnnnnnnnnnngccatcgggagcaagccccctcccacattttttaccgcacagccttatttagcctggtagatgatccccgggctgcactgcaccatctggaaatggtccggcagaccgttcagcgcctcagaagcgccaaggaacagataaccaccgcgcttgagcgtgccgtggatgcgcaacaggatgtctttcttcacttcggccgagaagtagatcagcacgttgcggcagaacaccatgtcgaacttgcccaggctggcgtagctgtcgagcaggttgaaggagcggaattccacgcggttcttgatcggcgccttgaccgcccagcgtcctgcccctttcgggtcgaagtaacgctgcaggcgctcctgggacagaccacgccccagggccaggctgtcgtactcaccggtcttgcagttggtgagcatggtgccggacagatcggtggccacaatttgcgcccccgccttcaactggcccatgttggtccgctcgaactcatcgatggacatcgaaatcgagtacggttcctgccccgaggagcaggccgccgaccagatgcgcaggcgctggcccgggctggccttgatggcctccggcagcactttgctcttgagcacttcaaacgggtaggtgtcgcgaaaccacagggtttcgttggtggtcatggcatcgaccaccatttccttgagcccgctgcgcggctggccctggatgcgctgcaccaactcacccaacgacttgatgccctgctgctccatcagtttgttgagacggctggataccaggtactgcttgttttcaccgagcaatatgccacaggctttttccaggaagacccggaactgttcaaaatccaaattacctgtagacactgataccgcctctaaaatcgtatgaccgccaagggaaacaccttagctgtgatctgctgccttgatccggtcgacaacccgggatgccaggtcatcaggacggaatttggccaaaaagtcatcggcaccgaccttcttgaccatcgcctggttgaatacacccgacaacgaagtatgcaggatgatatgcaatttttgcatgcgtggatcgttgcggatctcggccgtgagggtatagccgtccatttccggcatctcgatgtcggaaatcatcatcaagaattcttcttccggcttcttgccgtcatccaccagcttgcgcaggtagtccagcgcctggcgcccatcattgagggcgaccacttcaacgccgacggtttgcaggcaccgggtcacctgcttgcgcgccacggacgagtcgtccaccgtgagcacgcgcagtgagactgccttgtgcgcggtttcggcgtccaccacacccaccgagatcgactcggaggtaggtgccacttcggcgagaattttctcgacgtcgatgatttccaccaactggttgtcgacccgcgtcaccgccgtaaggtaatgatcgcgccccgtgcccttgggcggcggatggatctcttcccagttcatgttgacgatgcgctccaccgaacgcaccaggaaaccctgggtcttggtgttgtactcggtaatgatcacgaacgggctttcgcggtcctgcaaaccggcggaaccggtggccagggccagatcaagaatcgggatcgtcgcgccacgaatgttggcaacgccacacactaccgggctggacttgggcatgatcgtcagcttggggcattgcagcacttcccgcaccttgaacacgttgatgccatacagctgcttgccatccaggcgaaaaagcaacaactccaggcgattctgccccaccagctgtgtgcgctggtttactgaatccattactcctgccatgccttgactcccacgctaaaaccttcggccatacctataagggcagtgacgcgcacccaacactaaacggcacgagctttgctatttattggtcatggatattaaaacgacagtttcccgacgcctccacctgacacggtattgcagactgctctgcgcaccgctggcactgcttgccttgggcctgggcgccacggcccgcgcagataacgtcaccttgcctgatctacttatcggcgtcacccagggctttcttgagttcactgtagaagattatctggcgaccacccagacgccggggcgttatgaaatccaggtcaaccagttggacccgcgcctgcgcatgcccatgtgcgacaaggaattgacagccaccctggaaagccccgcccaacccatcggtcgcgtaacggtgaaggtgcgctgcgacggcgcctcgccctggacggtgttcgtgcccgcccaggtcaaattgttccgcgatgtggtggtggttgcccgcccacttaaacgcacgggcattatcggttttgaggacgtggtgctgcgcgaacgcgacatcagcatgatcagccagggctacttgacctccctcgaccaggccgtcgggcagaaactgacccgaccagtggtcaccgatcaggtcatcaccctggtgcacctggagcaggccgaggtgattcgcaaaggtgaccaggtagtgatttccgccagcagtggcgcgctgcaggtcaaaatgccgggggaagccttgtccaacggcggcatgagcgaacagatccgcgtgaagaatctcaactccaaccgtgtgatcaaggcgcgagtcacggcccccggccaagtggaggtggctttatagaccactggtatcagacgccagcttttcctacactgtcggttggatgccggccggtgcagtttattgtcattcgagcctaaagtttgtccggatatggccgaaaacatggcaagcgtccaaatacccagaggttttttgatcatggtcatcgatttcagccgtttaaatagcaccccgacaacgtcggctcctacgcgcactgtcggcaccaaggacagcgtagaagccaaggctcagccactgcccgccaaggcagaacaggccagcgccagccagagcggggaatccgtacacctgagcaatgaggctcaacagttgcagaaggtcactgactcgctgcgcgatcaaccggtggtcaataaagcccgtgtggccgaattgaaacaggcaatcgccgatggcagctataaagtcgacagcaaccgtgtagccagcaagctgcttaatttcgaagccgagcgctaggcaaaggcctgcgccgggcttttggacgcttaaaccccaaggccagccatgcatcacgacgaaaccctgcttcaactgatcattgatgatctagcaccgacgcaattgctgctcgagctgctcagggaagaatccctggccctttacggccgggacatgcccctgctggaagaaattctggcgcgcaagcaatcgctgattgtcctgctggaacagcacggcaaaaaacgcagcgagatcctcgtcagcctgggcctgcccgccgaccatgatggcctcgcgcagctggccagccactcctcggtcggcgatcaactactggcccagagcaaagaactcaacctattgctcacccagtgccaggaagccaaccaactcaacggtcagtcgatccagcttcagcaagccacgaccgccaaccagttgcgtatacttcacggcggagagcctccagcgctttacaacgctcagggttccacctcgcgcctggtcaagccaagcacccgcagccaagcctgacgccggtttacagcgcggcctatccaaggcgcgccacatactggcagaatgcccgctcttgcgtgtagtcgtattttgtctggagatggaagaaccgtgttcaacgcccttaatgcggaagatgccccgcagccacccaaggtcctcaccacgcctctggaaatcgccagtaccttgcgcatgctgcaagatagccatgacccgctgatcattaccttccacgaacgcagccagcgcttccagagctacctggtggacgtcagccgggacaacggcaccctggccctggatgaaatgatcccccgcgacggtgaacgctacctcgaaaatggcgaacccttccgtatcgaaggtttccacgacggcgtacgcgttgcctgggaaagcaacggcaacctgagcatcagcgagaaggacggccaccgcatctacaccggcagcctgcccgacgaagtggtctaccaccagcgtcgcaatgcctttcgcgctgccctgaagctggcgcaactggtgaacatcgaattgggtggcgagaagctcaaggccccgatcagcggcaagctgctggatatttccgccacaggttgcaaattgcgctttgagggagacatctccgagcgtctgcagttaggccaggtctacgaccgctttatcgccgccctgcccttcggcagcatgaccacctcggttgaactgcgttacctgcactttgaagagaagatcaacaccacgtttgccggcgtgcgcttccacaacatgagtggtctggtgcagcgtcaggtcgagcgctttgtctaccagttacaacgcgaagcacgacgtttcgataaagacgacgatttttaaactcaaagatcgcggcaaaaaaacgggcagaccctgatgggatctgcccgtttttgtattcaggggcgcgccctgctcaagtcatgaggatgctcgtccgggcccggcggctcaggcggcccctcaaagagcggctcgtcgaccgatgtgaccgtttccggatcgggttccggcgcggcggtttgcatttgctcctgcaccaccgcctcgtccacccgtggatcgaggcaggctaccaacggcgagctggacatgctgtcgggcattgccacgtggtgcagcggcgcgtcatccacctgatgcaggttggtcacggctttcggccgaatccgccacaccaggatcagcgcacacaggctgaaaaacgcatacagcatgtgactgccaaacaccttcatcaccacaccggccagcaacggcccgatactcgcaccgacaccgtaggtcaccagcagcatggcggtgagcgagacacggcggtcgccttccacatgatcattggagaacgccaccgccagcgggtacaaacagaactgcaccagagaacacacgaagcccgccacgaacagtacttccagcggcaccttggtcagtaatgccagcggcagcgccgccactgccaggcacagggcaaagcaacgaatcagcagcgcgcgatcatagcggtccgacaaccagcccaacggccactgcaccagcaggccggcaaaaatacaactgcccatgaacagacccacctgttcggtagacagcccttgctgggaggcatagagcggcgccaggccatagaacgagcccacgatcacccctgcccccagcaccgtactcaacgactgcgggacgcgcttgataaagaagcgtggctccatcggcgccggatgcaggggcgccgggtgaatacggcgagtcattgccaccggcaccaggcacagcgcaaagcacagtgcgaccagcatcagcaattcgaggccgagctgagggtgcatgaccaggatcaactggccgagcaccagccccaggtaggacgcgatcatataaccgctgaacaccacgccgcgctgcttggcgtcggcctgttcattgagccagctctcgatgaccatgtactggcacatcatccccaggcccacgatcatccgcagcacaatccaggccggcagccagtcgatcagaccatgccccagcaccgccgcgccgacaatgccagcgcaggttgcataagcacgaatatgcccgacccgggcgatcaggcggtgcccgatcttgccgcccagcaccaggccaaaatagttggccgccatcagcgcaccgacccacaggctatccacatggtcggccgccaggcgcaaggccaggtaggtactgagcaggccggagccaatcagcatcatcaaggaggcgaaataaagggctcgaaaagatttccagatctggcgcatcggcgttccgagcggctccttgcagtgagagacaggcctatcggcatgatagtccggggtgaccgggtccggacaggcaacttgcgctgtttccggggattattttgcttaaaggctcagacgctgcccgaccgcttgtgaggtacaccgattgtgaaaaatgcacgcacacgtgctgtgaacgctgaacaccggcaaggttcgacccgtctttgaaaggcgcccacaaaaaagccctgccagaacagtctgtgcagggctttgaatctggtgtcccagggccggttcgaacggccaaccttccccttaggagggggatgctctatccaattgagctactgggacaaatgacagccgctacactgggacgcggcgacagacggcgtgcatgttaacggccagggtaggttttgtcatgtcgtccgtaggctttttgagtgtaggccgatacttgcctgattgatcgtgtttcaaccccggcgacgcgggcgcacgggctgtatcgtgcaaaatgcactccctcaaaatgccatcattgcaaattgcaacctaaaagccattaaaaccatcggtaagtatctgattttattgaattaatagattggcacgacacctgcaatacttctcctacaaccccaataagcctcggcgttaaacggagaacataatcatgaacagtgcccttctgttagccctgaacaccgtcgccctggccgcgttggtcatgtttcattttcaatccaccggtagcaacgaccctgcgcagatcagccaggccatcccccaccatttgcaacaacgcccgcaactggcagtgatgactccgaatgcgcaatcgccggtacgcctgacccaagacacccaagcggcacctgctactgaacactgggtattctgaggaagccgctgatgaataaatatgcctggctgttcctgtgcctgaccgttgccacagcggttctgggtttgggtgcggaatctcaagacggcacaaccaccgctttcattgccagcggtgtattcgccagcctcttattgctgacgctcatcgtcggtcgtcgcatcaaattcgaccctgtcctgcgctaatcccctctgcgcccgaccttatgtcgcctgaccctcgcatatcggcaaattgccactagtcttaaagctaagggcaaagggccactttgctataggatgtgcggcctgaaaccctgtagtggcccgggcttgcgggaagttccctcgcggattcacgcggtgaaaaattttccaaccagtccgcaaaaatgcaaatgagtgctggcataaagcctttaggcagttcaatatttgtcacagaattgacgccaaggaactgtcaaatctgaggcatgatgcggcctctttgcaattcaggttgaactttggtcgtgagccttgtcttaacactcatcttgcggccaattccaaaaaccgctcccctgaactaaccggttaaatatatgcgcccattgaaacaggcaatttattccagccgtacggctgacaagttcgtcgtacgtctgccagacggaatgcgggaacgcattgccgaggtggctcgcaatcatcaccgcagcatgaactccgaaatcatcgctcgcctggaacaaagcctcattcaggaaggtgcgctgggcgacgagttgagcatgcgcctggacagcccagagctgtcgttgcacgaacgcgaactgctgcagcgttttcgtcagctctcccaccgccagcaaaatgctctcgtctcgcttatcgcgcacgacgttgaggcggccgcagaagccaattgatctgcaactgaaagccgaagccagccatgtgctggcttttttttgcctgggatttgggaagagaatgcaaggcgggagcagatacgctcccgccggatggaatcaaagtagaaagatcgtcgccagacccaggaagatgaagaagccaccactgtcggtcatggccgtgatcatcacactggcccccatggcagggtcacgcccaagacgagccagggtcatcgggatcaatacgcccatcagcgccgccagcagcaggttgagggtcatcgcagccgtcatcaccacccccagcgaccaactgccatacagcaagtaagccaccacaccgatcaccccaccccacacaagaccgttgatgaggccaaccgccagctccttacgcagcaaacgcgatgaattggcggtactcacctgatccagcgccatggcgcgcacgatcatggtaatcgtctggttacccgagtttccgccgatcccggccacaatcggcatcagtgctgcaagcgccaccaacttctcgatcgacccttcgaacaagccaataacccgcgaagcgataaaggctgtgatcaggttgatggccaaccacgcccaacggttatgcagcgagcgccaaaccgaggcaaagatatcttcctcttcacgcagacccgccatgttgaggacttcggtctcgctttcttcacgaatcaagtcgacgatttcatcgatggtcagacgaccaatcagtttgccgttcttgtcgacaaccggcgccgagatcaggtcgtaacgctcgaatgcctgggccgcgtcgtaagcgtcctcgtccggatgaaagctcacggtgtcgctggccatcaggtcggcaactttcttctccggatcattgaccagcaggcgcttgatcggcagcacgcctttgagaatgccttcgtaatccaccacgaacaatttgtcggtgtgacctggcagctctttgagtcggcgcaggtaacgcagcaccacttccaggctgacgtcttcacggatggtgaccatctcgaagtccatcagggcgccgacctggtcctcgtcataggacagcgcggagcgcacacgctcacgctgctgagtatccaacgcttccatgagctcatggacaacatcacgaggcagctcaggggccaggtcggccagttcgtcggcgtccatctccttggctgcagccaggagttcgtgatcgtccatgtcggcgatcagggtttcacgaaccgagtcggacacttcgaggaggatgtcgccgtcgcggtcagccttgaccaactgccatagggtcagtcgatcatccagcggcaaggcttcgagaatataggcgacgtcggcggagtgcaggtcgtcaagcttgcgctgcagctcgacgaggttttgccggtgaaccaggttttcaaccaggttgttattcgggccatcctggcggtgcgtaaggtcttcgaccacacgctggcgctgcagcagctcaatgacttgagccaggcgatcctgcaggctttcttgtgttttctttacttctacttcggtcataggcgaactccactcccagcagcggggcacgccggaaggatcaatcagtcaattcatgattggtaaaacggggtactgagtaactactgggtaagtccatggaggtattccacaagccccggcggggctgacgggcgcaatgatacaccgcccggccactttaaacgtcaaaaaactggaaagaacaagcgcttgcgagccaaagctgagcaacggccgcatctatgaactgcgacgacgcagcggatgaggaaaacacatgaaggcgagagaaaaagaacaaatcccacacaaaccccagacggcaaaaagcccgcactaggcgggctttttgtttgtatggtgcactcgacaggattcgaacctgtgaccgctcggttcgtagccgagtactctatccagctgagctacgagtgcagattgtgtttttagaccagatcacaactggttgtaaccgaatcacctgcattgctgcaactgactcttaaatggtgcactcgacaggattcgaacctgtgaccgctcggttcgtagccgagtactctatccagctgagctacgagtgcatttgttgccgcgcattataggccgttcaatctctatgtaaagctattttttcgagtaatttcaacaacttaccgaaaaaaccagattgcaacgtactaagcaaataatggcggagaacgggggattcgaacccccgacacccttttgaggtgtactcccttagcaggggagcgccttcggccactcggccagctctccgcaacacggggcgtatattaaccacgttcatccccgtttgcaaacataaaaaacgataaaaattaaaggcttggttcttcgtccttctctttcttgatccgcaggtagatttcctcgcggtgcaccgctacctctttcggagcgttaaccccgatacgcacttgattgcctttgacgccgagcacggtcacggtgatttcgccatcaccgataatcaggctttctgcgcaacgacgagtcagaatcagcatacctttctcctcacgcatttcagttcaggaacaacagtctgcaaaaaaaaggccttcgacctacaacccaaaggccatagccctaccgcctaagtattgtcgagcgcgcgcaaaagaacatgcgccctacaaaaaaaggaaaggcgcggtaaaccgcgccttccaggcactgcgtcactcgccctgtcgggccggagcgtccagctcaaaagcggtatgcagagcgcgtacagccagctccaggtacttctcttcgatcaccaccgagactttgatttccgaggtggaaatcatctggatgttgatgctttccttggccagggcctcgaacatgcggctggcaacgccagcatgggaacgcatgcccacgcccacgatcgacaccttggcaatcttggtatcgccaaccacctcgcgggcgccgatttccttggcagtgttctgcaggatccgctcggccgcatcgtactcgttgcggtgcacagtgaaggtgaaatcggtggtgttatcgtgcgaaacgttctgcacgatcatgtcgacttcgatgttcgcaccgctgataggacccaggatcttgaacgccacgcccggggtatccggcacgccacggatagtcagcttggcttcatcacggttgaaagcgataccggaaatgatcggctgttccatggattcctcttcatcaatagtaatgagggtgcccggaccctctttgaagctgtgcaatacgcgcagcggaacgttgtacttgccggcgaattccaccgcacggatctgcaacaccttggaaccgaggctggccatttccagcatctcttcaaaggtgatcttgtccaggcgctgggccacggacaccacacgcgggtcggtggtgtagacgccatccacatcggtgtagatctggcattcatcagccttgagggccgctgccagcgccacgccggtggtgtccgaaccgccacgcccgagggtggtgatgttgccctgctcgtccacaccctggaagcctgctacaactaccacgcgcccggctttcaggtccgtacggattttctgatcgtcaatctgcaggatacgcgccttggtatgcgcgctatcggtgaggatgcgcacctggctgccagtgtaggacaccgccggcacaccgcgtttattcaacgccatggccagcaacgcgatagtcacctgctcgccggtggacacgatcacatccagctcacgcggcagcggctgttgatcaccactgattgccttggccagatcgatcaggcgattggtctcgccgctcatggccgacagcaccaccaccaggtcgtcgccggcatcgcggaacttcttaaccttgtcggccacctgctcgattctttcgacagagccgaccgaggtgcctccaaatttctgtacgatcaaagccatttctaagccgcctcagcccgtaaaggggcgcctaatatccaatcaaccagcaccacaccggcccgtgactagaccacgggccggttaacagtgccttaaatacctgcctcgacaaacggcacggtcagggccagggccgcgtccaggctgccggcgtctacaccaccgccttgcgccatgtccggacgaccaccacccttcccgcccactgccgcggcggcttgcttcatcaaatcaccggctttgagttggccagtcaggtccttggtcacacctgcaaccagcacgaccttatcctcatggacaccgccgagcaggatcactgcgcggccgagcttgttcttcaactgatcgaccaaggccaacagcgccttgccgtcctggccgtccaggcgtgcagccaggactttgacgtccttgacgtccaccgccgaagccgacaggtcgtcgccggccgcactggccgccttggcctgcaactgctccagctgtttctccagggcgcggttgcgctccagcacagcggacagcttgtcgatcagattgtcgcggctgcccttgaccaggctggccgcttccttgagttgttcttccgccgcattcaggtaggccagggccgcagcgccggtcaccgcttcgatacgacgcacaccggaggccacgccgccttcgctgatgattttcagcagggcgatgtcgccggtacggttggcgtggataccgccacacagctccaccgagaagtcaccgcccatgctcagtacacgcacgctgtcgccgtacttctcgccgaacagcgccatggcgcccttggccttggcggtctcgatatcggtttcttcggtttctaccgcggtgttcttgcgaatctcggcgttgacgatgtcttccagggccttgatctgctcaggcttgatcgcttcaaagtggctgaagtcgaaacgcaggcgctggctgtctaccaaagaacccttctgctgcacgtgctcacccagaacctggcgcagcgcggcgtgcagcaagtgcgtggccgagtggttcagcgaagtggcatgacgcacatcagcgtccacctgggcatcgaccggcgcacccacggtcaggctgcccgaagccaacacaccgtggtgcaggaacgcaccgccggtcttggtggtgtcacgcacatcaaaacgaccggaagccgccttgaggaaaccgcagtcgccaatctggccaccggactcggcgtagaacggggtctggtccagaaccacaacaccgtcatcgccttcattcagtacatcaaccgactggccgtccttatacagggcgaccactttggccgagccgctggtggccttgtaaccggtgaattcagtggctacgtcaaccttgaccaggctgttgtagtccatgccgaacgagctggccgaacgtgcacgcacgcgctgggcttccatctcgcgctcgaaaccttcctcgtcgagggtcaggttgcgctcacgggcgatgtcgccagtcaggtccatcgggaaaccgtaggtatcgtagagcttgaacaccacgtcacccggcaccacggagccttgcaggttggcgaggtcttgctcgaggatcttcaggccctgctcaagggtcttggcgaactgctcttcttcagctttgagcacgcgctcgatgtgcgcctggttctgcttgagttccgggaaggcttcgcccatctcggccaccagggccgcgacgatctgatagaagaaactgccgttggcacccagcttgttaccgtgacggcaagcacgacggatgatgcgacgcagcacgtagccacggccttcgttggacggcagcacaccgtcggcaatcaggaagccacaggaacggatgtggtcggccacaaccttgagggaagcctggtcttcattggtgcaaccaatggccttggccgcagcggccagcaggctctggaacaggtcgatctcgtagttggagtgcacgtgctgcatcaccgcactgatccgctccaggcccatgccggtgtccaccgacggcgctggcaacggatgcaacacgccatcggcggtgcggttgaactgcatgaacacgttgttccagatctcgatgtaacggtcgccgtcttcttctggcgagcccggtgggccgccccagatgtcagcgccgtggtcgtagaagatctcggtgcaagggccgcacggaccggtatcgcccatggtccagaagttgtcggaggcgtacggtgcgcctttgttgtcgccgatgcgcaccatgcgctcagccggcacgccgacttccttggtccagatgtcatacgcttcgtcatcgctggcgtagacggtgacccagagtttttccttcggcagtttcagcacgccagtcaggaaggtccaggcgaagttgatcgcgtcttgcttgaaataatcgccaaagctgaagttgccgagcatttcgaaaaaagtgtggtgacgggcggtatagcctacgttttccaggtcgttgtgcttgccaccggcgcgtacgcatttctggctgctgactgcgcgggtgtacgcgcgcttttcctggcccaggaagcagtccttgaactggttcatccccgcgttagtgaacagcagggtagggtcattgcctgggatcaaggagctggaggagacacgggtgtgaccttgctcttcgaagaagcgaaggaaggcttcacggatttctgcgcttttcattaggttcttccacggaggctgcggccaaaggccagtgcgcaacatcatcagacgaagcgacggcaaagggccgcattatatcggccctttgccggtggtacagcgtgtttatgcgatagagaggctcaattagacggtctgcacagtcatttgcgcgaaaagtcgacgaatgtcgcgagcacttgctcgacctgcgcccggctcacatccaaatgagtgaccatgcgcaggcgcggtgcggcgctcagcttgatcccgcgttcggcggcaaacgccttcaaagcctgggcctgatcaccgatctgcacatagaccatgttggtctgcaccggctccacctcataacccgccttgcgcaactccccccccagccattgggcattggcgtggtcgtcggccaggcgctgcacctggtgatccagggcatacaaccctgcagcagccagggaaccggcctggcgcatgccgccaccgaccatcttgcgcaggcgccgggccttggcgatcagcgccgtggaaccgcacaacaccgagccgacaggcgcaccgaggcctttggacaggcacaccgacactgaatcgaagtgctgcgcgatctcccgtgcatccacccccagctttaccgctgcgttgtagagcctggcaccatccagatgcagggccaggccatgctcccgggtaaacgcgcgggctttggccaggtactccagcggcagcaccttgccctgcatggtgttttccaacgccaacagacgggtacgggcgaagtggaaatcgtctggcttgatggctgccagcacctggtccaggtccagtgagccatccgcctgcacttccagcggctgcggctggatcgagccgagcactgcggcaccaccaccctcgtatttgtaggtatgggcctgctggccgacgatgtactcctcgccgcgctcacagtgggccatcaacgccagcaggttgctcatggtgccggtgggcacgaacaacgccgcggcaaagcccaggcgcttggccagttcggcctccagccggttgacgctggggtcttcgccatacacgtcatcaccgctggcggcagtggccatcgcgtcgagcatgccgggggtgggttgggtcacggtgtcgctgcgcaggtcgatcacagacatgaaacaagcctctcgagggttcagtaagtgccttttgtgagtgattactgcgggcaacgccacggaatatcaagccccaactgcattcaatcgaataccaaccaaacaaaccgatatagcttatcgataccgcggtcgtgcagttttcgaaaaaccgtgttaaaaactctccgccgccagggttctggcggcaacgttctcagggcggggtgcaattccccaccggcggtaattacacgcaatgtgtatagcccgcgagcgcttggcgcctcgaactgctcacgtaggacggcgacaaggtcagcagacccggtgtgatcccggggccgacggtcatagtccggatgaagagagaacgggattggcacctgagggccgcgcacgatgtgtgctcgcgtacccttaaatcccattcgattcataacgccctgtttttttcttaaacaggagtcagaacatgcaacccaccgcaatcgacagcaaagccaagcaccaccacggcgaacgtatcgcgtttatccaggcttgctggcacaaggaaattgtcgaccagagccgtaaaggcttcctcgccgagatcatcgcccagggctaccaggaatcggacatcgatttcttcgaagtcggcggcgcctttgaaatgcccctgcacgccaagctgctggccaagaccggccgttacgccggtatcgtcgccgccgcgctggtagtggacggtggcatctaccgccacgaattcgtcgcccaatcggtggtcagcggcctgatgcaggtgcagctggaaaccgaagtgccggtgttctcggtgtccctgaccccgcatcacttccacgccggcagcgaacaccagaccttcttctacgagcacttcgtgcacaaaggccaggaagcagcacgcacctgcgccgacaccttgcacaaagtccgcgcgattcgccgtagcgagccacgcgcggtagcagtctaagcaacacggcaaagtacaaggtgggagggggcttgctcccgatggcagtgtgtcagtcacttaattgtcaactgacccaccgctatcgggggcaagccccctcccacatttggatcggatgaggctttgagcttcaggccaagccgacgtccgtcgtcggcacaatcaatatccccgcccgcaaaccattcttcaccttcgggttggggaagatgatgcgcgcgccctcctcctcgatcacccagcgggtcttggccacgtcttcggccagcagatagccctgggccaacggcgagaagttttccacatccgccggcaggtgcagcaggaaggcgtcgctgtgcttgatgacttcacgggagacggcaaacagttgcaggccgtcgaggctgctggtcggcggctcggtgccttcgatgatctgcttgaggcgtgtttccaggcgggacacgtccacgccctggttttgcccgaacggccgcgccttgcccaattccagggtgaacgcctcggcatcgagttgttcgtaggtaaacgcggtgaacgtgatcgaggtcttgttctgcaacagcaccgcttgcatgccggcagcgttcaggcgcgccagttcatggcgtgaatgctggcgaccttccttccatgggtacagggcgaactgctcgatcttcgagccgcgaatggccgtgtgcaggtcgtaatgcaggcgtgaacggcccggcaggctgaaaaaactgcgggccagttgctccagctcggcggcgcgcatggcctccggaccaatgtttttttcatgccgaccgttgaacagccggttgacgtccagttcgaggtaacgctcgccgcggcgcatggcctcggggttgccgaacaggaacagaatacgggtacggggcttgatctccccacgggcaatgccatgcaacaggcggtcgagcagttcgatcggcgcggtttcgttgccatggatgccggacgacagcagcaggtcgctgccgttgtccttcgcctcaggcgggcgcacttcgagtgcgccctcgctgagccagcgcatctgcacgccgtcgacagtcagttgaattttttgcgccggttcgcgaccggcgagggtcagttcaagcagtttgccaagggcgagcatacgcagcttccttagtggttgcagcctgggccgtggacgtgatcgtcgtcatcaccttcaacatcggccggttccatttccagttgcaggctcatcaggttggtggccaatgggcgcatcagcaggttggcatattcggcgtcgccctcttccacgtccacgccgatcagcagttggccacggccgtcgtgctggatccagatttccttgccctgccagaccacggcgacgcgggtgcaggaagtttccagctgggtgccgtcggtgtcttcaagaatcagtttcagggtgtcggtggtcataatagatagttctcagccgtacggcgttaattgatctggaaaggataaaccgcgcccagtttaaggatttgcgtcagttcatccagtgccgtccggcactcaagcagcaattgcgggtcagccaggtcgctttcgcgcaggctgtcgcggtagtgcttgccgacccactgggtcagggtgtcgtacaacggcgcggtcatgataacgcctggattcaccgccgccagctccgtttcgttcaacgctacgcgcaaacgcaggcacgccgggccgccaccgttctgcatgctttgcttgaggtcgaacaccttcacctcgcggatcaggccaccggcagcggtcaggttttgcagatactgccagacgcgttcattggcgcggcattcttccggcacgatcagcagcatcgaaccatcggcgcggctcagcagttggctgttgaacaggtatgaacgtaccgcgtcctcgacgctgacctgggcgcggggcacgcacaccgactggaagttaccccccagcttggccaacttgccttgcagctcgccgagcatctgttcggtattgaggaacgcgtcttcgtggtagaacagcacttcgccgttacccaccgcgatcacgtcgttgtggaataccccggcatcgatcaccgccgggttctgctgggcatagaccacaccgtcatcctgcaaaccgtgcaaacgcgcgacggcctgggaggcttcgagggtctggcgcgccgggtacttctgcggcgccgggtagcgggggtcgaacgcgctgcgaccgaacacgaaaaactcgacacccgcctcaccgtactcacggcagaaacgcgtgtggttggccgcgccttcatcgccgaactgcgccacggcgggcaacgcggcgtgatgggcgaagtgcttctgatcagcgaacatcgcccccagcacacgactggtggtcgggtgctcgatgctgcggtggtacttgcaattgaggttggcggcagtgaaatgcacgcggccatccgccgtatcggcgctcgggctgacggtggcggcgttggccacccacatgctcgacgccgagcagctcgcgaccagcaacggcatagcgtctttggccgcctgctggatcacttgcgcgtcggtgccgctgaaacccaggttgcgcaaggcggccacgtcaggacgttcctggggcgccaacacaccttgtacaaagcccatgtccatcagggctttcattttctgcaggccctgcaacgctgcttccttcgggttggaatgctgctggctgttgctctgggacgcgacgttgccgaaggacaaaccgccgtagttatgggtcggccccactagaccgtcaaaattgacttcataggatttcatcggcgaggctccacgaacatctgtttttataagcaatcttcagtactacagagatccaatgtgggagggggcaagccccctcccacctttaaatcagtgtgatgccgggggtcagcgtggcaggcaccaccaggctcggggtctcaagcgaggccaccgggtacgcacaataatccgccgcgtaataggcgctggcgcgatggttgcccgacgcccctaccccgccgaacggcgcggtactcgcggcgccggtcagttgtttgttccagttgacgataccggcacgactttccagccagaactgctggtagcgcgcttcggaatccgacaacaagcccgcggccaggccgtactgggtgttgttggcctcggcaatcgccgctgcaaagtcagcgtagcggatcacctgcaacaaggggccgaacagttcttcgtcttcacgctcggtcacaccggtcacgtcgatgatgcccggcgtgagcaacgcggcctgatcctgtggctgggtcatctccaacagcgccaccgcaccgttggccaacatcaattcctgggcgtccatcaaggctttggcggcgccgagggaaatcaccgagcccatgaacggcgctggttgctggtcaaacgcaccgacctcgatggtcgcgctgaccgccaccaggcgcgccagcaacgcatcgccccaggcaccttcgggcaccaacaggcgacgggcacaggtgcaacgttggccggcggagataaacgccgactggatgatggtgtagaccgccgcatccacatcggccacttcatcgaccaccagcgggttattgccgcccatctccagcgcgagaatcttgtccgggcgcccggagaattgctggtgcagatgattgccggtgcggctggagccagtgaagaacaacccgtcgatgcctgggttggccgccagggcgatgccggtttcccgcgcgccttgcagcaggttcagcacgcccgccggcaggccggcttcgatccagcactgcacagtcagctcagcgactttaggggtcagctcgctcggtttgaacagcacagtgttacccgccagcaaggccggaacgatatgcccgttcggcaagtggccggggaagttgtaagggccgaacaccgccaccacaccgtggggtttgtggcgcaatacggcggtggcatcgcccagcgagccgctcttctcgccggtgcgctcgcggtagctttgtaccgagatcgcgatcttgttggccatgctggtgacttcggtcgctgactcccacagcggcttgccggtttcctcaccaatgcagcgtgcgatttcgtcggcgcgttttttcagggtggcggtgaaggtctccagtacgccgatgcgctcttccagcgaacgtctggcccaggaggggaaagcctgacgcgcggcctgcacggcggactcgacctgttcggcggtggcgccattaccggcccacagcacctgctgggtcaccgggttgcgcgattcaaacagctcaccctggccagccagccagctacctgcgatgtacagcgaattcattatttcgactcccgagcagcggacaacggtacggcacgcacttgatcgcccaccaccaaacgcaggcgcttggcggtctgcgggtcgaccaccagggttccggctgcgaggcgggccggggcggcggtgatgcggcaatcttcgcgtttgcggttatggatcaggaacggcgtggcgtcgtcgcctggggtgccgatcgccaataccagtgtttcgctgtcgcgaacggcacggatcttctgggtctcacactccaccgcaggtcccgcgtcgaaaatatcgacgtagccctggtagctgaagccttcactcttgagcatgctcaacgccggttcggtatccgggtggaccttgccgatcacgttgcgcgcatcttcggaaaggaagcagctatacaacggaaacttcggcatcaactcggcgataaacgccttgttgcccacaccggtgaggtaatcggcctggctgaattccatcttgaagaagtgccggcccaggctttcccagaacggcgaacgcccggcgtcgttggacaccccgcgcatctcagcgatgatcttgttaccgaacaactgcgggaattcggcaatgaacagcaggcgcgccttggccagcatgcggccgttgaggccgctgcggtaatcggcgtgcaggaacaacgagcacagttcggaattgccggtgaggtcgttggccaggaacagcgtcggaatctcacggtagatgttcagctcctgggaggcgctgacggtcaagccaacccggaagttgtaccaaggctcacgcaagccgacggcgccggcgatggcggaaatgcccaccactcgaccctcgtcgttttccagcacgaacaggtagtcggcatcgccgcgcccggcgtcgccgcgaaaggttttttcggcccagcccacgcggtgggtcaggcgctcttcgttggccggcaaggtggtgaggccggtgccggtgctgcgcgccagatcaatcagggccggtaaatcgctgctgcgtacgggacgaacgatcatgctatctcctcgaacgggccgctgttgtcagccacccgcgaaactctctttttaaaccgctaccaggcgcacgctcgcaccttcgccaacacccagggcctcggccgctgccaggtccaacgtcaccggtttacccggcgcgtagtccagctccagcatcaccgcgcggtagtcctgcaattgcgcgttgctcaccaggtactggcgaccgacgcccttgaccatctcgccgatcttcaccggcactacgcggctctgggcgatcgagcgaatgcccgagacccgtgcgtgcagcgtcgggccgccgtcgaaaatatcgatgtaatggtcggtctcgaagccttcgcgcatcaggatgtcgaaggtgatctgcgcacgcgggtgcacctggcccatggcttcctgggcttcgtccggcagcagcggcacgtagatcgggtaatgcggcatcagctcggcgaggaaggtgcggcttttcagcccgcacagacgctcggcggcggcgtagttgaggtcgaagaagttgcggccgatggcgtcccagaatggcgagtcaccgttctcgtcgctgtagccgacgatctcggtcaccaccgagtcggcaaagcgctcgggatggctggcgacgaacagcaggcggccacgggaattgagttccgaccacggcgaaccgaccagctcgggcaccacgtagaaactggtgagcaggctgttgccggtgaggtcgtggcactgggaaagcacgtggatcttgttgtggatcttcagctcgcgggaagcgtgcacgaaggtctcgttacggaagctgtagaacggctcggagtaaccggccgacgcgacaatggccgagcagccggcgagcttgccggtctcggtgtcttcaagcacgaagaaatagctttcttcaccgttgaagctcacctcggcggcgaaagacgcttcgctcgcggcgatcttgtcgctcaggcgttccacgtcgtccggcaaggaggtgacaccaatcgggctgtccgcagccagacgctgtacctcgcccagatcagccatttgcgcggggcgcatcaccagcatggtgtcactccttaactcgaaaaactcataggaaaaaataccggacagttcctgattcaacgcaggtcaaatgtgggagggggcttgcccccgatagcagtctgtcagttgataaatcaggtggctgacccatcgctatcggggggcaagccccctcccacatgacacggtccggcaaataagggtgtatcaggcttgcgtcagcgtttttactgcacgttcaaaacggtccaggccttcctggatgtccgcgtcttccaccaccaggctcggcgcaaaacgcaccacgtcggggccggcctgcaggatcatcaggttttctttctcggccgcgttgaacacgtccttggccttgcctttgaacgcatcgctcagtacgcaaccgagcaacaggcccatgccgcgcacttcggtgaagatgccgtattgcttgccgatctgctccaggcgcgccttgaacagctcgtgcttggcattcacgccagccagcacctcaggggtgttgatcacgtcgatcaccgcttcggccaccgcgcacgccagcgggttgccgccgtaggtggtgccgtgggtgccgaccaccaggtgcttggccaggtcttcgcgagtgagcatggctgcaatcgggaaaccgccgcccaggctcttggcgctggtgaggatgtccggcaccacgccgtagtgctggtaggcgaacaggtggccgctgcggcccatgccggtctgtacttcgtcgaacaccagcaaggcgttgttggcgtcacacagctcacgagcaccttgcaggtaggccagttcggccggcagtacgccgccttcgccctggatcggctccagcaccacggcgcaggtcttgtccgacaccgcggctttcagcgcggccaagtcgttataaggaacgtgggtgatcccggtgattttagggccgaagccatcggagtacttggactggccaccgacgttgacggtaaacagcgtgcggccgtggaagctgttcagcgcggcgatgatctcgtacttctcggtgccgaaacggtcgaacgcgacacgacgggccagcttgaacgcggcctcgttggcttcggcgccggagttgcagaagaacacacgctcggcaaaggtggcgtcgatcagcttatgcgccaggcgcagggccggctcattggtgaacacgttggacacgtgccacagcttgttggcctgttcggtcagtgcaccgaccagcgccgggtgggcgtggcccaatacgttgaccgcgatgccgccggcaaagtcgatcagctcgcgaccagcctggtcccacacgcgcgaacctgcgccacgcacggggatgaaggcggcaggtgcgtagttgggaaccatgacctggtcgaaatcggcacgttgcaccggggcttgctcaacggacatcggagtctcctgaagaggaacgcctgcctggaactggcgggcgatgcagggattgtaaggacagttttcagtagggccttgtcgccaagcgacaacttcttatagcgccaacccgcgttttacgcgggtttacgccaatgcgacaaatagcatcgcaatggcgcagtttaaacgctgcgcgccgtttgcgtgagggccagacgtgccggcggcataactatctaaagtccggcatgccggggcggctgatttactcgtggtttcgagcccctcatggatccgagcatgacaaccccgacttctcctgtaccggcagtcagcgataacagccgccccgaccaagactttgaaccattgaccggcgccctgcccggctggctgctcagcgcgtccgtgcgccagcgcgaggcgttcaaaaaagctgcgcccctgcctttacccaccgccaacgccgcgcagcaagccgccttcaaacagctgaacggtgcacattggcaagcccagagacgcgtcgacaacgcgctcaaggatctcaaggatcccaaggcgttcggcaaacccttgcttgcagacgccttgaaacagcagttcaaccttgaactggatgtggaagcgacctttatccgcctatacatcccgctgaccatcccttggtttcccgtgcgctctggcgccgcccgcgcctggaccgtatcgctgctcgacgccgcactgcacaacttcgaacacaaggaaacccaggcggacgcttatgaaccggcctccacctacatcacccgtcccgacgcttccggccggttcgacaccttgccggcgatcaaacaccaactgccggtcgctgccttcgcccaactgtgtcgcgacctcgacctgggcgcccgttacatgcgctacctgcgtagcgggctgggcatggacagcccggtcgccagcgcggtgctgcaaaccaaggtcgacgccagccagaaagccgccctgcgcgcagcgctgcaactggcacggctgcagcaggatatccaggacgattacgcgcaggtgatagagggtttcatcgatggccgtaccggcctgcgcctcggcacaggtccggtgctgtgccatgaattcagcatgatgggtacaccgctgaccggtatcctgctgttcgcaccggatcttgaaaacacccgtagcgtgcggcgcctggtggcctatgtgccagatgacccggaacacccgctcaaggaatatcgctctgcgctggcattcaagcaggaactgacccggcaactgcgtacccaggactatcaggcgttcttcagtcgcttcgtggcccatgaacacctcggggcgtttttcgccgacctcagccagcgcctggagaaaatcacctggcaccccagtgatcaaggcaaaggtctggccccttggcgcgccgaacccaccgacgatcccacgctgcaattctccgccatcccgatcatgggcgatccgtgggtattcctctatcaatccaggctgaacaaaatcctcaacgacgcccgcaccctggcggtcgccaccgccaccgtggaccgcaacgcccgctgggcgcggtgggatgcgttcgtcaatgtggcctcctccattgtgaacacgctgctgatggtggttgcacccttcatcccggggcttggagagctgatgctgggctacatggcctatcaactgctcgacgacgtcttcgagggcatcgtcgattgggccgaagggctcgaccgcgaagcgtttgcacacctgatgagcctgctggaggctgcggttcaactggggctgtttacggccggcacgcaaatcggcgtgcctgagttacgcaaactgttgtcaccgcaaaccctggccttcatcgatcgtttcaaaccggtcaccctcgccaatggcgcccgccgctactggcaacccgacctcgagccttaccagcagaagctgcaattgccgccgcacctgggtattgacgcacgcggcctgcatgacgtgcgcaaggaatcgatcctgccgctggaaggcaaactctatgcggtgaaaaagtcccctgaggacggccagtaccgcatccaacacccaacacgggccgacgcctatcaaccccagttgcaccacaacgagcacggtacctggcggaccgaactcgaccaaccgctgcaatggaccaaacccaccctgctcggccgcctgggctaccgggcgcagggcctcagtgacgccgaccgcgagttggccctgaccctcagcggcacccctgaagacggcctgcgcaagatgcaccttcacagcgagcccctgccaccgttgctcgatgacgccctggcacggctgcgcatcgagcgcgacctggacaccctgatccagcgcctgaacagcgatgacccggcagtgtacggccgtatcgacccgcaggacctgctgcaactgctcaccgccaacggctcatggccacacacccggggcttgcgcttgctggatgatcagggccgtgtggcgtgggtcttcggcgatcagtccaagcctctggtgcaaattcatgaagcacaattgaccaacggtgacttgctcaaggcggtgctaaaggcgctgaccccggaagagatccgcgcacagttcggcgagcgcgccagcgacccgcaattgagcctggaaacccgcgcgcgcaacctgaggaagcggctggccgagatcgcacgcaagcatcgaggcgccctgttcgaatcgcgctatgggttccggcagcattccgcacacccccaggcccagcggctgatcgacagcgcccccggcttgcccgcatcggtcgccgaaaagttgctgggccaggcaaccgcgcaggaactgacggcactgcgcgaacagcgcacgccaccgcgcctggcgcaactggcccaggcggcccttaccgaggtacgcctgaaccgcgcctacgaggggcaacacctggactcgcacatcaacctcgacagcgaccaactgacgctgagcgcactgcgattgctgccaggctggtccaccgacgtcaacctgcaagcccggcaccgcaccatcgacgggccgctgtggcgcagcatcggccccgacaccgcccccatccgccgcagcctggtacgcctggacagcggccgctacgtgccctatgacgagcgcggcccgctgtccggcgagaccgacctctacaccgccatcctccacgccctacccgatgcccagcgcgatcagctgaacatcggcatccaccaaggccctgaactgcgcgaacgcctgcgccaacacccgccgccacgccacgagctgcgggtactgctgggcgccgagccggaacccgccgtcgaaaccctgcaactgctcggcaacgatgcgggttatgcccaacaaccgcgcaccgcgggcagcccggtgagcctgcagcaacgggcacgtaccctgtaccccggcctgagggatacccaactgcaagcactcattgaacagttgcagactcgcccgggcggcgcagcaacacagctcgctcaattggcccgggaatatgcacaactgaaccgagacctgctggcctggcaaacggatattccgacccaccacccgaccagcgcccaggcgttgagcacctgggagcggcgccaggaggaacagaaccgcttgaccattgcccatcagctcaagcaagcctggcgccgcgaaaccaggatcgacgattactacgaagacccggcccgcgacggccatgtgctgaacctgaacgccaactttctcggcgagctgccacgcctggacgcccagttcgatcacatttccatgctgctgttggacggctccgagtatctgcagggcgtgctgccctttctcagccgctttcccaggctgcgccagctgggggtcatgaacaccccgctggatgttctgcccgcacacataacctcgctgcctcagttgaattcactgcaattgagcaattgccggatcaccctcacgccggagagcctggcgcggctgtcggcgatgcatcagctgcgctcgctggacctgaacggcaacccgctcggcctcgtccccagtatcgaggccctgcctgaactggtcgccctggacctgtcaaataccggcatcgagcgcctgccggccggcctgctaagccgtacggagctacaagccgctatcttgaacgacaaccggatcagcacgttgccgcaggccatgttcgaattgtcggccgagtccagccgccgtttcgacctgtcgcgcaacccgctctcacgggcgacgctggagaaggtcaagacctactaccaggcacacggcacctacctggaggccaatgccctgcccgccgacatgcgtgacgcacaacggctgtttccgacgttccgcgacgagcagatcaaccggttcatcttcgacctgccgggcgacatagaggccggcagagtggccctggcgcaattggccgccgactatcagaccctgaccgaggaactccagacctgggcccgggcccccgccctctccgacgtagagcgcggacgccgaaccgtactcaaggaactgctggaacgcagttggcggcgcgaaaccccgcaacagacccgctggctcaactccctggaaatctcaagcgccctggccggtgagctaccgcagttgagcatccgcttcgagcatatcggcggcattcgtatcgagggtaacggtcgccccctgcacctggatcacttcctgtccagcttcaacaagctgaacgttgtcgacatcagcgacgcgccgctgggggatatccccgcgccgttgttcaacctgcaacgcctggagtttctcggcctgccccgatgctcgatcacgctgtccgccacttccgtgcgggggctggaagggttgaaccgcctggcgttcctggacctcaaccacaacccactgggactcatgccggacttcaaccgactccctcaactgagccgcgtgcacctgcgcaacaccggcctgcgcgaagtgccgaccggcctgctgagcagcgaactgcatgcggcggttgacctgagcaacaatgccattgaggacctgcctgcgagcctctctgatttgcccgacgcgatcgcccggggcgttgacctgtcgggcaacccgttgtccgggcaggcattggaacggatcaaggcctattgccaacgcaccggagagttcttcagagccagggtttccgacgctcagcgcgcacgcgtgcaacagctctacccgaccttcatcgccagcgaggccgatcgtttcagcttcaaactgccaggcacgatgagcgacatagacgctgaaatgcgcgagctcgaagaggaataccgccagctggacaccgacctggatgaatggattgtcgatgtgccgacgcaccacccgatcctcgacatccccctggacgaacagacacgcgccgaacagcaattggtaaggcgcaatttcaagacattgctcaaacaagcctggcgttatgaaagccccgaagacgaagagagcctcgatgacgatctgacccatgcagtgacactcgaaacgccgatactcggcgcactgccacaactcaatgcgcgcttcgagcatgtgacttcgttcgaactgatcagcgacggcacaaccaccgaagtcgacggcaccctcagggggttccccgagctgcagacactgaccctcaacagatgctcattgcaaaccctgccgacgtcgattttcagcatgccgcacctgtcctccctggaccttgccgaatgccgactgagcttgacgcccgaaagtgcgcgctcactggaaaacttgaatggcattgaattcctcgacctgagcaacaaccctctgggccacgcgccagctgtcagccgtttgtatcagctgagctcgctgcacctgcgcgatgcccaattgcgtgaggttcccgagggagtattccaactaccgtccctgcatacgctggacctgagcaacaacctgatcgagacgttgcccgaggccatactggaagtcgcaacaaccctcgacaacgactccgacctgcgcggcaacccgctgtctgagcacagtctggaattgttgcggcagtactacctgcgcaccggttttgccctgtatgtccaggcggctacacgggatgccgcgggcaaccggttgattccaccgcagggcccgccagaagaggagtgaagcaggcgttcaaccgcgttccgacggcaccgatgacagttcgaacgggctgctgctgcgccgctggttgcggtcttcacggggggtggcgccgaagaaattgcggtaggcgctggagaaatgcggccccgaggagaagccgcacgacaggccgatctggatgatcgacttgctggtttgcatgagcatctggcgggccttgttcaggcgcagttccaggtagtactggctggggacgcggttgaggtattgcttgaagatgcgttccagttgtcgtcgcgacacgcagacgtgctgggcaatttcgtcggtggtcagcggttcctcgatgttggcttccatcagcaacaccgcctgggtcagcttcggatggctggaacccaggcggttttgcagcgggatacgctggcgttcgccgccttcgcggatacgctctaccaccagttcctcggacaccgcaccggccagttccgcgccgtgatcacgggccaataccgccagcaacaggtcgagcaccgacatgccaccgcaggcggtgagacggtcgcggtcccagtcgaacagatggctggtggcgatgaccttggggaagcgctcggcgaaatcgtcctgccagcgccaatgcacggcagcacggtagccatcgagcaggccgagctgggccaacggatacacaccggccgacagaccaccgatcacacacccggctcgcacaagctgcttgagcgcagtgctcagttgcgaggcaatgacagtaggtggctcatccgccagcaggaacagcttctggaaaccctcgagcttgccggcccacggctcgcccggcagttgccaggcaccttcggtggccggttctgcaagcaggaacgacagctcgtagaccacatccggatgcacccgctgggcaacgcgcaaggcctcctcagccagcgcaagcgtcagggcttttgtgctgggccaaatcaggaaaccaattttgtgggcggtcatggagtgctatccgaagccagtaacagtaatgaagacaagggccaatgctagcccgtaatcgagtacaaatctcaaaaacgatgcatatccaatgtgggagggggcttgccccctcccacacaaagcaaaccccataggcaggaattacttcaggctgccggacaggaactgctgcaaacgctcggactgcgggttcaccaacacttcccgtggattgccgcgctcttcgacgatgcctttgtgcaagaacaccaactggttcgacacctcacgggcaaagcccatttcgtgggtcaccaccaccatggtacggccttcctgggccaggtcctgcatcaccttgagcacttcgccgaccagttccgggtccagcgccgaggtgggttcgtcgaacagcatcacctccggctccatcgccagggcacgggcaatcgccacgcgctgctgctcgccaccggacatgtggccggggaacgcatccttgcgatggcccacgccgactttggccaggtaatgctcagccttttcacgggcttctttcttcgacatgccgagcacatgcaccggcgcttccatcacgttttcaagcgcggtcatgtgcgaccacaggttgaaatgctggaacaccatggacaggcgcgaacgcatgcgctgcagttgcttggggtcggcggccttcatggcgccgtccttgttggccaccaacttcagctcttcgttgttgagcaggatcttgccggcgtggggttgctccagcaggttgatgcagcgcaaaaaggtacttttgcccgaaccactggaaccgatgatgctgatcacatcaccggccgcggcggccagggacacacctttgagcacttcatgactgccatagcgtttatgcaggtcttggacttcaagtttgtacatgcggtcggttctcacaaaaacaggtggtcagtcgttgagcaagcgcccgtgacgcagcgcttcgcgccccgccaccttggccagccagaaacccgcttgggcataacgtagccgttcaacggcaaacagcacccccgaggtgcccgcgcacagggtgctgacgcggtcttccagggggtcaatcacttcaaagatcggttcgcctttttcgacccagtcaccggctttacgcaggtaactgatcaccccggcgtggggcgcgaacagcagttcagtgccttcaaacggtacgccttcgcacggctcgtattgcggcgcgggccattcacccttgatcaagccctgctcggcaaggaacgccaggatgccttcggcgtggaagaccgcttcgtcgcggccggtatcagcctggccacccagttccagagtcgtcgccaggcaggccagcgggacctgtgcgtcgggaaacgcctgggacaagcgtagccacggcagcgaacaggcttcatcgaacgagctgccgccggagtcttccgccagcaggccgactttcagattcaaatgggccgacagcgaacgccactgcggccaatgctgcggcagcgcatacatgtgcagcgcagcttcggcatcacaatgcaggtcgagcaccacatcggcggtgcaggcatggctcagcaggatgcgctgcatgccctgcaactggctgctcggctcgggcagcgcgttaagcgtgtcactcatggcctggcggatcatgcgcacgttggcgtggggatcatcgcccagcttgccgtcaagcaatgcggcaaccggctcgctcaactcgacgaaatcgcggttgaaattcttgccgctgccgacctcgaaacgcccctggtggctgccttgcagcagttggcccaggcccatcgggttggccaccggcaccagctcgatcacgccattgagcgcaccttgctgttccagttcgacaaggcgctttttcagctcccacgcggcgcgcatgccgggcagttcgtcggcgtgcaggctggcctggatataggccttgcgctcgcccttgccgaaacggaacacgctcagttggcgctcgcagcccaggtgactccagggcaaccggtgatcgatacgttgcatatcagtgcttcctcggcgccaggtagctcagccagcggcgctcggccaacttgaacaggcgcaccaggatgaaggtcaggcacaggtagaacacaccggcggtgatatacgcctcgaacggcaagtagaactgcgcgttcacggtgcgtgcggcaccggtgatgtcgatcagggtgacgatggaggccaggctggtggtctgcagcatcatgatcacttcgttgctgtactgcggcagcgcacgacgcagggccgacggcagcaggatacggcggtacagcttgtagcgcgacatgcccatggccttggccgcctcgatctcgccattaggcgtggccttgaggctgccggcaatgatctcggcggtgtaggcgctggtgttgatcgcaaaggccaggcacgcgcagaaggtggcgctggacagcagtggccacaggaaactctcgcgcaccgcctcgaactgggccaggccgtagtagatcaagaacagctgcaccagcatcggcgtgccgcgaatcacgtaggtatagagccaggccgcaccattgacgatcggctgcttggacacgcgcatcaggcccaggggcaaggccgcgagcaggccgaagaacagcgagatggcgagcagtttcagggtggtcaccaggccgccgaggtacagcggcatggcctcccagatgacgttgtagtcgaagatcatagatcagccgcccttacgcctaccgagtagcgcttctcaagatgacgcagggccagcaacgacacgctggtgatcaccaggtacatcgccgccactgcgaggaagaaggtaaaaggctcgcgggtggcgtctgccgcctgcttggccttgaacatcatgtcttgcaggcccaccaccgaaatcagcgcggtggccttggtgagtaccagccagttgttggtgaaaccggggatggccagacggatcatctgcggcaccatcacccggaagaacacctggaaactgctcatgccatacgccaggccggcttcggcctggcccttgggaatggccatgaaggcgccacggaaggtttccgagagataggcgccgaagatgaaacccagggtgccgataccggcggccaaggggttcaagtcgatatagtcgtcatagccgagcatcggcgcgacgcggttgagcaggtcctggccgccgtagaaaatcagcaggatcagtaccaggtcggggatcccgcggatcaccgtggagtacaagtcacccaaccaagccaaccagcgcaccggcgacaggcgtaacgcgaccccgatcagacccagaacaatggccaaggccatggacgacaaggcgagctgaagcgtcaaccatgcgccatcgaggatgacggccccgtagcctttcaacatgattcaggtcctcgaaaagggggatgaaaaaatggcgcaaacctcaggaattctgttgcttgcgccatttgggacagacagctgcgacgagttacttagggtcagcgccgtaaatatcgaagtcgaagtacttgtcctggattttcttgtattcgccgttggcacggatcgccgcgatggccgcgttgatcttgtccagttcggccttgtcgcctttacgcacagcgataccgatgccgtcgccgaagtacttggcgtcggtgaactgcgggcccacgaacgcgtagcctttaccggccggggttttcaggaagccgtcttgcagcagggtggcatcagccacggtaccgtcgaggcgaccggcttccacgtccaggtagatttcgttctgcgagctgtaaggcacaaccgtgacgcctttaggggccaggacttccttggcgaaacgatcgtggatcgaaccacgttgcacaccgatcttcttgcctttcaattcatccaggctgtcgctgacggtggtgccttccttcatcaccagctgcgctgggctcaggtagtagcggttggtgaagtccacggacttcttgcggtcgtcggtgatggacatggacgacaggatcgcgtcgatcttgcgcactttcagcgcagggatcaggccgtcgaattcctgctcaacccacgtgcacttgactttcatctctgcgcacagggcgttgccgatgtcgtagtcaaaaccgacgatgctgccatccggcgccttagaggcaaacggagggtaagccgcttcgataccaatcttcaggggcttttcatcagcgaaagcctgcatggacagcacggacagcgccagggcgcccaacagcacgagtttcttcatcttgggactccatcggtatagggcaaaacagcagtatgagccatggcccacgatgcggcgtaagggaaaccgaatagcggtgctgcgtcctacaccgattcaacatcggagacgacgagcgagtgatcggcattctaacgacaggctggaagccgatatttcctcaatgcgacaacaatttacagaagcaccgagaaagcggatccaactcattgacagcctctggattttatgcagagacaaaagacattaaacctgtagacgctgcaaattgcgggcctattattcgcaaacccttctggcacggcaagtctggcgtttaatcttatttcctggggtgtctggaatggggtttttcggggcgcagacgtagcacattgcctcaggtttgggcgggaggttacacattgagggttggcggtaacattcagaaacgccctacacgaaaaaccgatatttatttgactggcgtggatcccatgtgggagggggcttgcccccgatagcggtgtgtcagtgaaaggcatttcaactgaaccacggcaatcgggggcaagccccctcccacactggatctccggtgcttttgaggccgctcaaaaaagccccacccggcttacaccgggtggggctttatctgactatcccgccttacgcgacgttcatggtcttgtgcgtctcgatcaaatgcgccaccacacccgggtccgccagggtggagatatcccccagcccgtcgtactcagccgtggcaatcttgcgcaggatacgccgcatgattttccccgaacgcgtcttcggcaagcccggcgcccactggatcacgtccggcgaagcaatcggcccgatctccttgcgcacccagtttttcagctccagacgcagcgcctcgttcggctcttcgccgtttttgagggtgacatacacatagatgccctggcccttgatgtcgtgcggcacacccaccaccgccgcttcggcgactttagggtgggcaaccatggcactttcgatctcggcggtgcccatgcggtggccggacacgttcagcacgtcgtccacacggccggtgatccagtagtaaccgtcttcgtcacgacgcgcaccgtcaccggtgaagtacatgccacggaatgtcttgaagtaggtgtcgacaaaacggtcatggtcgccgaacagggtacgtgcctggcctggccacgaatcgaggatcaccaggttgccttcggccgcgccttcaatcaggttgcccaggttatccaccaacgccggcaccacgccgaagaacggccgtgccgccgaacccggtttgagcgcatgggcgcccggcagcgggctcatcatgttgccgccggtttcggtctgccaccaggtatcgacaatcgggcaacgggattggccgacgttcttgtagtaccagtcccacgcctctgggttaattggctcacccaccgaaccgagcaggcgcaggctggagccgtctgcgccttcgcacgcagcagtgccggacgccatcatggcgcggatcgcggtcggggcggtgtaaaggatattgaccttgtgcttgtcgacaattttcgccacccgcgtgatgtccgggtagttcggcacgccttcgaacagcacggtggtcgcgccgttggacagcggcccgtagacaatataggtgtggccggtgacccagccgacgtcggcggtgcaccagtagatttcgcccgggcggtagtcgaacacgcgctcgtgggtcaggccggcgtacaacagatagccgccggtggtgtgctgcacgcccttgggcttgccggtggagccggaggtgtagaggatgaacagcgcttcttcagcacccatctccttgggcgcacacacagtgcccgctactttcatcaggtcttcgtaccagatgtcacggtgctggttccacttgatctggccgttggtgcgcttgcacacgatgactttctggatgctgctggtttccgggttggtcagggcgtcgtcgacgttggccttcagcggaatcttcttaccggcacgaataccttcgtcggcagtgatcaccaccttcgacttacagtcgatgatgcgaccggccagggcctccggcgagaaaccaccaaacaccacggaatgaatcgcaccgatacgggtacaggccagcatggcgaccacggcttcggggatcatcggcatatagatagtcaccacgtcgccgcggtgcacatcctggccgcgcagggcgttggcgaacttgcagacttcttcgtgcagctcgcggtaggtgatgttgcggctctcggcagggtcgtcgccctcccagatgatcgcaatttgatcgccacgctcggcgaggtgacggtccaggcagttgtaggaaacgttcagggtgccatcggcgaaccacttgatgtcgacgtggtgatcgtcgaaagaggtctgcttcaccgtggtgaaaggcttgatccagtcaaggcgcttggcttgctcgcgccagaagccatcggggttgaccaccgactgctggtacatggccttgtaggtcgcctcgtcggtcagcgtgttggctgctacttcggggcgaacggggtacagggaagccgcactcatctttcttacctcggtgacatagttgttgttgtatggccctgttgtagccggggccgacctatagaaccattcgacgatggtagtaacaagcccctacaaattgccctgatatccccgtttgcacctctagcccgcgggccgtggcgctttgcggctttgtgaaaaaagctttaccacaggattgttacaaaaaccgccaatagtgtttatcaaaagcacgggtatatgaatataacgtgagggcctaaaatcacttccgccaacaaggcactgtagttaaatacagcagtgattaacaacgcaacagcccccacgaaggcaacgttaatccgaacttcccaactcttaagttacacacgtggcctcacaagggccccgtgacccctttcgccctgaagaaggtaaatagagaaatgaaagctttagtagttatggccctcagcagcttgtgcgccaccgccgccctggccgacgaagccccgactgacgtagctggcagcaaccctccgatcgttgaagactacacttacagcacccatctggatgtggcaaaagtactgtccatgagcagtattccggaagtgtgcgaagtggtaccggtgaagatggaatatgaagactcacagggtcagcgtcatatacttaattaccatgtgatgggcaatggttgttctaacgggtaatcacttggttagtttgaacttattcgccgcaagaaatggttcttgcggcaaagcaccgccccccttcccccctcgctgcacatcctcaaaaaaaatcctgccgctcgcccctccagccaaccccaataaacccgagccttggctcgaaaagcaggctttttgtctgcgatccgtgaccatccgccacaacacaaagccgattttttccctataatgcgcgggtaaatcgggcctgcaatatccctttacacagggatgaagagccagacctgaggcctcccgctggagcaagcaaccaccgctccgcacctcaagcctcacgcagagcacccgtaaccctattccgtttaatgcgtgcgctagctgcaacaaacgattccttaagatccaccgcggccctgggggccgtgtgaacacccaaccatccggtttcacacgggcacctttgagccctcacgcaggagacgacacgtcatgctgagctgggacgaattcgacaaagaagaagaaggcgaagtggccaccaaaggcgccaacgccggccacgccaccgaagccaacatggaccgcctcgacggtgccggcgctgccgccgccatcgaagcccgcgccgtcaccgccagtgactccgccgccatcgtccgcgccaaggccgccctcgacaaactcgacgtcgccgaaggcctcgccgaactcgaaggcgcctccgcccgtgtcgccgttgacgaaaagcgcatgatcaactgccgcgccgacctcaaccaactcgtacccttcaagtacgactgggcctggcagaagtacctcgacggctgcgccaaccactggatgccgcaagaggtcaacatgaccgccgacatcgccctgtggaaaaaccccgaaggcctgaccgacgacgagcgtcg

SEQ ID NO: 121 - DNA, 567 bp, Pseudomonas nodulensis; identical to SEQ ID NO: 14
